(19) United States
(12) Patent Application Publication
(10) Pub. No.: US 2022/0017715 A1
(43) Pub. Date: Jan. 20, 2022

(54) Compositions and Methods for Efficacy Enhancement of T-Cell Based Immunotherapy

(71) Applicants: DOW GLOBAL TECHNOLOGIES LLC, Midland, MI (US); DOW BRASIL SUDESTE INDUSTRIAL LTDA., Sao Paulo/Sp (BR); ROHM AND HAAS COMPANY, Collegeville, PA (US); YALE UNIVERSITY, New Haven, CT (US)

(72) Inventors: Sidi Chen, Milford, CT (US); Matthew Dong, San Francisco, CA (US)

(21) Appl. No.: 16/625,542

(22) PCT Filed: Jun. 22, 2018
(86) PCT No.: PCT/US2018/038966

§ 371 Date: Dec. 20, 2019

Related U.S. Application Data
(60) Provisional application No. 62/524,148, filed on Jun. 23, 2017.

(51) Int. Cl. C08J 7/048; C08J 7/04; C09D 7/62; C09D 175/08

(52) U.S. Cl. CPC C08J 7/048; C08J 7/0427; C09D 7/62; C08J 2475/04; C08J 2323/08; C08J 2323/14; C09D 175/08

(57) ABSTRACT

The present invention includes compositions and methods for enhancing T cell based immunotherapy. In certain aspects, the invention includes modified T cells and inhibitors of Dhx37 for use in enhancing T cell based immunotherapy and treating cancer.

### CROSS-REFERENCE TO RELATED APPLICATION

[0001] This application claims priority to U.S. Provisional Application No. 62/524,148, filed Jun. 23, 2017, which is hereby incorporated herein by reference in its entirety.

### STATEMENT REGARDING FEDERALLY SPONSORED RESEARCH OR DEVELOPMENT

[0002] This invention was made with government support under CA121974, CA209992, CA196530, and GM007205 awarded by the National Institutes of Health. The government has certain rights in the invention.

### BACKGROUND OF THE INVENTION

[0003] CD8+ T cells play a central role in maintaining cellular integrity of the body by mounting cell-mediated adaptive immune responses against intracellular pathogens and tumors. Selective activation of pathogen-specific CD8+ T cells is mediated by T cell receptor (TCR) recognition of cognate antigen on surface major histocompatibility complex (MHC) class I (MHC-I), which results in T cell proliferation, cytokine secretion, and selective killing of target cells. Defects in this cell population can lead to recurrent infections or cancer, while dysregulated activation of CD8+ T cells can result in immunopathology, and even severe autoimmunity.

[0004] CD8+ T cells have become the central focus of new cancer therapeutics due to their specificity for intracellular antigens and their role in cell-mediated immune responses. The most potent drugs that have recently been developed are immune checkpoint modulators. This new class of drugs enhances the anti-tumor response of CD8+ T cells by neutralizing the activity of CTLA-4 or PD-1. Blocking the activity of CTLA-4 permits the activation of naive CD8+ T cells in the absence of sufficient antigen. Inhibiting PD-1 activity can reinvigorate exhausted CD8+ T cells to proliferate and kill malignant cells in a subset of cancer patients. These drugs have been shown to be effective in treating multiple cancer types, including melanoma and lung cancer. Ongoing studies are being conducted looking at the efficacy of these drugs used either as monotherapy or in combinations. Further studies have identified 4-1BB, CD27, CD28, ICOS, LAG3, OX-40, TIM3, and VISTA for potential checkpoint modulation. Newer therapeutics have adapted CD8+ T cell machinery to activate under the control of a transgenically expressed chimeric antigen receptor (CAR-T). This method had success in treating hematopoietic malignancies.

[0005] Although checkpoint blockade and CAR-T immunotherapies have been shown to be effective when conventional therapies have failed, these modes of therapy still have large potential for improvement, as a large fraction of patients do not respond or have undesired side effects. More systematic approaches will allow for the identification of novel regulators of T cell functions to better enhance the body's anti-tumor response, perhaps in an orthogonal and/or complementary manner to checkpoint inhibitors.

[0006] Studies using gene-set specific RNAi/shRNA libraries have been used to identify novel genes that enhance CD8+ T cell function and cytokine production. These molecular tools operate by suppressing the translation of targeted mRNA through complementary binding, but the effects of RNAi are limited by the expression levels of the targeted mRNA, as well as the introduced small interfering RNA.

[0007] The development and application of CRISPR technologies have dramatically enhanced the ability to perform genome editing. High-throughput CRISPR screens have been developed and utilized for discovery of novel genes in multiple applications. Application of CRISPR targeting in T cells is the first step towards manipulating the T cell genome, which, together with the screening technology, leads to the hypothesis that high-throughput genetic screening will open the door for unbiased discovery of key factors in T cell biology in a massively parallel manner. However, large-scale CRISPR perturbation of T cells has not been reported, possibly due to multiple technological obstacles, the complexity of lymphocyte repertoires, the tissue architecture of lymphoid or non-lymphoid organs, or the tumor microenvironment.

[0008] There is a need in the art for compositions and methods for enhancing T cell based immunotherapies. The present invention satisfies this need.

### SUMMARY OF THE INVENTION

[0009] As described herein, the present invention relates to compositions and methods for enhancing T cell based immunotherapy, performing adoptive cell transfer, and treating cancer.

[0010] In one aspect, the invention includes a method of enhancing T cell based immunotherapy in a subject. The method comprises administering to the subject in need thereof a genetically modified T cell, wherein a gene selected from the group consisting of Dhx37, Lyn, Slc35c1, Lexm, Fam103a1 and Odc1 has been mutated in the T cell.

[0011] In another aspect, the invention includes a method of performing adoptive cell transfer therapy in a subject. The method comprises administering to the subject in need thereof a genetically modified T cell, wherein a gene selected from the group consisting of Dhx37, Lyn, Slc35c1, Lexm, Fam103a1 and Odc1 has been mutated in the T cell.

[0012] In yet another aspect, the invention includes a method of treating cancer in a subject in need thereof. The method comprises administering to the subject a genetically modified T cell wherein a gene selected from the group consisting of Dhx37, Lyn, Slc35c1, Lexm, Fam103a1 and Odc1 has been mutated in the T cell.

[0013] In still another aspect, the invention includes a method of treating cancer in a subject in need thereof. The method comprises administering to the subject a therapeutically effective amount of an inhibitor of Dhx37.

[0014] Another aspect of the invention includes a method of treating cancer in a subject in need thereof comprising administering to the subject a therapeutically effective amount of an inhibitor of a gene or gene product selected from the group consisting of Lyn, Slc35c1, Lexm, Fam103a1 and Odc.

[0015] Yet another aspect of the invention includes a method of generating a genetically modified T cell for use in immunotherapy. The method comprises administering to a naïve T cell a vector comprising a first sgRNA complementary to a first nucleotide sequence of a Dhx37 gene and a second sgRNA complementary to a second nucleotide sequence of the Dhx37 gene.

[0016] Still another aspect of the invention includes a method of generating a genetically modified T cell for use in immunotherapy. The method comprises administering to a naïve T cell a vector comprising a first sgRNA complementary to a first nucleotide sequence of a gene selected from the group consisting of Lyn, Slc35c1, Lexm, Fam103a1 and Odc and a second sgRNA complementary to a second nucleotide sequence of a gene selected from the group consisting of Lyn, Slc35c1, Lexm, Fam103a1 and Odc.

[0017] In another aspect, the invention includes a composition comprising a genetically modified T cell wherein the Dhx37 gene has been mutated. In yet another aspect, the invention includes a composition comprising a genetically modified T cell wherein a gene selected from the group consisting of Lyn, Slc35c1, Lexm, Fam103a1 and Odc has been mutated. In still another aspect, the invention includes a composition comprising an inhibitor of Dhx37, wherein the inhibitor is selected from the group consisting of an antibody, an siRNA, and a CRISPR system.

[0018] Another aspect of the invention includes a kit comprising an inhibitor of Dhx37, wherein the inhibitor is selected from the group consisting of an antibody, an siRNA, and a CRISPR system, and instructional material for use thereof. Yet another aspect of the invention includes a kit comprising a plurality of sgRNAs comprising the nucleotide sequences selected from the group consisting of SEQ ID NOs: 11-3020 and instructional material for use thereof.

[0019] In various embodiments of the above aspects or any other aspect of the invention delineated herein, the T cell is selected from the group consisting of a CD8+, a CD4+, a T regulatory (Treg) cell and a Chimeric Antigen Receptor (CAR)-T cell.

[0020] In one embodiment, at least one additional gene has been mutated in the T cell. In one embodiment, the at least one additional gene is selected from the group consisting of Dhx37, Lyn, Slc35c1, Lexm, Fam103a1 and Odc1.

[0021] In one embodiment, the subject is a human. In one embodiment, the method further comprises administering an additional treatment to the subject. In one embodiment, the additional treatment is selected from the group consisting of an immune checkpoint inhibitor, a PD-1 inhibitor, and a CTLA-4 inhibitor.

[0022] In one embodiment, the inhibitor is selected from the group consisting of an antibody, an siRNA, and a CRISPR system. In one embodiment, the CRISPR system comprises a Cas9, and at least one sgRNA complementary to Dhx37.

[0023] In one embodiment, the sgRNA comprises a nucleotide sequence selected from the group consisting of SEQ ID NOs: 1-10. In one embodiment, the sgRNA comprises a nucleotide sequence selected from the group consisting of SEQ ID NOs: 11-820. In one embodiment, the antibody recognizes and binds to at least one amino acid sequence selected from the group consisting of SEQ ID NOs: 3022-3031.

[0024] In one embodiment, the method further comprises administering to the subject an inhibitor of a gene or gene product selected from the group consisting of Lyn, Slc35c1, Lexm, Fam103a1 and Odc. In one embodiment, the CRISPR system comprises a Cas9, and at least one sgRNA complementary to a gene selected from the group consisting of Lyn, Slc35c1, Lexm, Fam103a1 and Odc. In one embodiment, the sgRNA comprises a nucleotide sequence selected from the group consisting of SEQ ID NOs: 821-3020.

[0025] In one embodiment, the first sgRNA nucleotide sequence is selected from the group consisting of SEQ ID NOs: 1-10 and the second sgRNA nucleotide sequence is selected from the group consisting of SEQ ID NOs: 1-10. In one embodiment, the first sgRNA nucleotide sequence is selected from the group consisting of SEQ ID NOs: 11-820 and the second sgRNA nucleotide sequence is selected from the group consisting of SEQ ID NOs: 11-820. In one embodiment, the first sgRNA nucleotide sequence is selected from the group consisting of SEQ ID NOs: 821-3020 and the second sgRNA nucleotide sequence is selected from the group consisting of SEQ ID NOs: 821-3020.

### BRIEF DESCRIPTION OF THE DRAWINGS

[0026] The following detailed description of specific embodiments of the invention will be better understood when read in conjunction with the appended drawings. For the purpose of illustrating the invention, there are shown in the drawings exemplary embodiments. It should be understood, however, that the invention is not limited to the precise arrangements and instrumentalities of the embodiments shown in the drawings.

[0027] FIGS. 1A-1G are a series of plots and images depicting a T cell knockout vector, a genome-scale library and genetic screen for trafficking and survival in CD8+ T cells with diverse TCRs. FIG. 1A shows schematics of the design of a T cell CRISPR knockout vector, which contains an sgRNA expression cassette and a Thy1.1 expression cassette. FIG. 1B shows schematics of an experiment involving library cloning, virus production, naive Cas9 CD8+ T cell isolation and infection, adoptive transfer, and genome-scale CRISPR library (MKO) targeted CD8+T_{eff} cell survival analysis in organs by high-throughput sgRNA sequencing. Organs collected include the liver, pancreas, lung, muscle and brain as representative non-lymphoid organs, and the spleen and several types of lymph nodes (LNs) as lymphoid organs. The LNs collected include three groups: skin draining lymph nodes (sLNs) that were comprised of inguinal, axillary, and brachial lymph nodes; cervical lymph nodes (cLNs) were comprised of the 6 superficial lymph nodes; and abdominal lymph nodes (aLNs) were comprised of the mesenteric and the pancreatic lymph nodes. FIG. 1C is a set of FACS plots of naive Cas9 CD8+ T cell infectivity with MKO lentivirus by Thy1.1 surface staining showing a population of transduced T cells with a significantly elevated Thy1.1 expression compared to untransduced cells. FIG. 1D is a series of pie charts of sgRNA compositions in representative organs. SgRNAs that comprised ≥2% of total reads for each sample are shown, with the remaining reads classified as “Other.” For clarity, only the gene names associated with each sgRNA are shown. Monoclonal (one major clone), oligoclonal (2 to 10 major clones each with ≥2% of total reads) and polyclonal (more than 10 clones with 2% or more reads) compositions of T cell mutants exist in various organs such as LN, spleen, liver, pancreas, lung, brain and muscle. FIG. 1E is a waterfall plot of the top sgRNAs across all organs ranked by number of organs being enriched in (FDR<0.5%). Inset shows all sgRNAs significantly enriched in ≥20% of organ samples. FIG. 1F is a barplot of the number of genes with 0, 1, 2 or 3 independent sgRNAs that were significantly enriched in at least one organ sample (FDR<0.5%). A total of 115 genes were found to have at least 2 independent sgRNAs enriched. Cd247, Bpifb3, and Tsc2 were found to have 3 independent enriched sgRNAs. FIG. 1G is Venn diagram of the three enrichment criteria to identify the top gene hits (≥2% read abundance in one sample (n=227), significant in ≥20% of samples (considering all associated sgRNAs) (n=118), and ≥2 independent enriched sgRNAs (n=115)). A total of 11 genes satisfied all three criteria (Apc, Cd247, Csnk1a1, Fam103a1, Fam134b, Nf1, Pdcd1, Phf21a, Prkar1a, Rab11b, and Tsc2).

[0028] FIGS. 2A-2E are a series of plots and images illustrating a genome-scale screen for trafficking and survival with effector CD8+ T cells with transgenic, clonal TCR. FIG. 2A shows the schematics of an experiment involving crossing an OT-I mouse to a Cas9 mouse, naive CD8+ T cell isolation from OT-I; Cas9 mice, CD8+ T cell transduction, adoptive transfer into mice, and MKO-transduced OT-I; Cas9 CD8+T_{eff} cell survival analysis in organs by high-throughput sgRNA sequencing. Organs collected include the liver, pancreas, lung, muscle and brain as representative non-lymphoid organs, and the spleen and several types of lymph nodes (sLNs, cLNs and aLNs). FIG. 2B is a waterfall plot of the top sgRNAs across all organs ranked by number of organs being enriched in (FDR<0.5%). A total of 27 sgRNAs were found to be significant in ≥20% of samples. FIG. 2C is a barplot of the number of genes with 0, 1, or 2 independent sgRNAs that were significantly enriched in at least one organ sample (FDR<0.5%). A total of 4 genes were found to have 2 independent sgRNAs enriched. Cd247, Bpifb3, and Tsc2 were found to have 3 independent enriched sgRNAs. FIG. 2D is a Venn diagram of the three enrichment criteria to identify the top gene hits (≥2% read abundance in one sample (n=99), significant in ≥20% of samples (considering all associated sgRNAs) (n=27), and ≥2 independent enriched sgRNAs (n=4)). The sets of ≥20% of samples and ≥2 independent enriched sgRNAs were contained in the set of ≥2% read abundance in one sample. A total of 3 genes satisfied all three criteria. These genes were Pdcd1, Slc35c1, and Stradb. FIG. 2E is a Venn diagram comparing the hits from the diverse TCR screen and from the clonal TCR screen. 17 genes were found to be significant in ≥2 samples from both datasets. These included 3830406C13Rik, BC055111, Cd247, Gm6927, Hacvr2, Lrp6, Nf1, Olfr1158, Opn3, Pdcd1, Serping1, Slc2a7, Slc35c1, Son, Tsc2, Tspan4, and Zfp82.

[0029] FIGS. 3A-3G are a series of plots and images illustrating a genome-scale screen for tumor infiltration with TCR-engineered T_{eff} cells into tumors expressing a cognate model antigen. FIG. 3A is a schematic of an experiment involving naive CD8+ T cell isolation from OT-I; Cas9 mice, CD8+ T cell transduction, adoptive transfer into E0771-mCh-cOVA tumor-bearing Rag1−/− mice, CD8+T_{eff} cell survival and infiltration analysis in tumors of E0771-mCh-cOVA tumor-bearing Rag1−/− mice by FACS and sgRNA sequencing. FIG. 3B shows measurement of antigen presentation in E0771-mCh-cOVA cell lines. E0771 cells were transduced with a lentiviral vector encoding mCherry-2A-cOVA transgene, and multiple clonal lines were generated by single cell cloning. MHC-I-peptide complex (SIINFEKL:H-K2b) was measured by mean fluorescent intensity (MFI) of surface staining using FACS.

[0030] FIG. 3C is a growth curve of mammary fat pad tumors from transplanted E0771-mCh-cOVA cells in Rag1−/− mice following different treatments. PBS control (n=3), adoptive transfer of OT-I; Cas9 CD8+T_{eff} cells infected with vector (n=3), and adoptive transfer of OT-I; Cas9 CD8+T_{eff} cells infected with MKO (n=8). Arrow indicates the time of adoptive transfer of MKO or vector transduced OT-I; Cas9 CD8+T_{eff} cells. Endpoint tumor size vector vs PBS, unpaired two-sided t-test, p=0.02; MKO vs PBS, p<0.0001, MKO vs vector, p=0.03. Data are shown as mean±s.e.m. Noted that some error bars were not visible because the absolute value of errors were small. FIG. 3D is a box-dot plot of overall sgRNA library representation in all samples, including cellular libraries of infected OT-I; Cas9 CD8+T_{eff} cells before injection (n=3), and tumors from multiple mice (n=10 mice, 10 total tumors). sgRNA representation is depicted in terms of log 2 rpm. FIG. 3E is a waterfall plot of the top-ranked sgRNAs across all tumors (21 sgRNAs significantly enriched in ≥50% of tumors, FDR<0.5%). Inset, waterfall plot of all sgRNAs that were significantly enriched in ≥20% of tumors. FIG. 3F is a barplot of the number of genes with 0-4 independent sgRNAs that were significantly enriched in at least one organ sample (FDR<0.5%). A total of 26 genes were found to have at least 2 independent sgRNAs enriched. Pdcd1 and Stradb were each found to have 4 independent enriched sgRNAs. FIG. 3G is a Venn diagram of the three enrichment criteria to identify the top gene hits (≥2% read abundance in one sample (n=36), significant in ≥20% of samples (n=220), and ≥2 independent enriched sgRNAs (n=26)). A total of 6 genes satisfied all three criteria (Cd247, Fam103a1, Hacvr2, Pdcd1, Prkar1a, and Stradb).

[0031] FIGS. 4A-4F are a series of plots and images illustrating high-throughput identification of genes modulating effector CD8+ T cell degranulation upon encountering tumor antigen. FIG. 4A shows schematics of an experiment involving naive OT-I; Cas9 CD8+ T cells isolated and transduced with MKO lentiviral library, co-cultured with SIINFEKL peptide pulsed E0771 cells (0 or 1 ng/ml), and stained for CD8 and CD107a for CD8+T_{eff} undergoing active degranulation. Stained cells were analyzed, and the top 5% CD107a+ cells were sorted, and subjected to genomic DNA extraction, CRISPR library readout, and screen data analysis. FIG. 4B shows titration of SIINFEKL peptide for MHC-I presentation in E0771 cells. E0771 cells were pulsed with different concentrations of SIINFEKL peptide, and the MHC-I-peptide complex (SIINFEKL: H-K2b) was measured by mean fluorescent intensity (MFI) of surface staining using FACS. FIG. 4C is a histogram showing CD107a+ T cells analyzed from the co-culture of OT-I; Cas9 CD8+ T cells and E0771 cancer cells. The top 5% CD107a+ cells were sorted. A total of three biological replicates were performed.

[0032] FIG. 4D is a waterfall plot of the top-ranked sgRNAs across all sorted cell samples (17 sgRNAs significantly enriched in ≥66% of samples, FDR<0.5%). FIG. 4E is a Venn diagram comparing the hits from the in vitro kill assay screen and from the in vivo tumor infiltration study. 3 genes were found to be significant in ≥2 samples from both datasets. These included Dhx37, Lyn, and Odc1. FIG. 4F shows growth curves of mammary fatpad E0771-mCh-cOVA tumors in Rag1−/− mice following different treatments. PBS control (black, n=4), adoptive transfer of OT-I; Cas9 CD8+T_{eff} cells infected with vector (n=4), and adoptive transfer of OT-I; Cas9 CD8+T_{eff} cells infected with sgDhx37 (n=5). Arrow indicates the time of adoptive transfer of MKO or vector transduced OT-I; Cas9 CD8+T_{eff} cells. Data are shown as mean±s.e.m. Right panel: zoomed in view of tumor growth curves from adoptive transfer of sgDhx37 or vector treated OT-I; Cas9 CD8+T_{eff} cells. Adoptive transfer of sgDhx37 OT-I; Cas9 CD8+T_{eff} cells led to significantly reduced tumor burden compared to vector controls. **=adjusted p<0.01, ***=adjusted p<0.001, by two-sided t-test (Benjamini, Krieger and Yekutieli method).

[0033] FIGS. 5A-5E are a series of plots and images illustrating single-cell transcriptomics of sgDhx37 OT-I; Cas9 CD8⁺ TILs in E0771-mCh-cOVA tumors. FIG. 5A shows schematics of an experiment involving adoptive transfer of vector or sgDhx37-infected OT-I; Cas9 CD8+ T_{eff} cells into Rag1−/− mice bearing E0771-mCh-cOVA tumors, tumor harvesting after 50 days of growth, FACS for CD3+CD8+ T cells, microfluidic-based approach of reverse-transcription and multistep barcoding library preparation to produce single-cell barcoded DNA droplets, followed by high-throughput sequencing and computational analysis. FIG. 5B shows t-SNE dimensional reduction and visualization of individual tumor-infiltrating CD8+ cells treated with either sgDhx37 (n=191 cells) or vector (n=361). FIG. 5C is a Volcano plot of differentially expressed genes in tumor-infiltrating CD8+ cells treated with sgDhx37 compared to vector control. A total of 137 genes were significantly upregulated in sgDhx37 treated cells (Benjamini-Hochberg adjusted p<0.05), while 215 genes were significantly downregulated in sgDhx37 treated cells (adjusted p<0.05). Top upregulated genes included Rgs16, Nr4a2, and Tox. FIG. 5D shows gene ontology analysis of significantly upregulated genes in sgDhx37-treated tumor-infiltrating CD8+ cells. Several gene ontology categories were significantly enriched (Bonferroni adjusted p<0.05). These included lymphocyte activation, positive regulation of cytokine production, regulation of cell-cell adhesion, regulation of immune effector process, and positive regulation of interferon-gamma production. FIG. 5E shows gene ontology analysis of significantly downregulated genes in sgDhx37-treated tumor-infiltrating CD8+ cells. Several gene ontology categories were significantly enriched (Bonferroni adjusted p<0.05). These included ribosomal small subunit assembly, ribosomal large subunit biogenesis, regulation of reactive oxygen species metabolic process, regulation of cell migration, positive regulation of leukocyte migration, and apoptotic signaling pathway.

[0034] FIGS. 6A-6E are a series of plots and images illustrating FACS data for MKO virus titration for screening. FIG. 6A shows schematics of an experiment involving virus production, CD8+ T cell isolation and infection with a genome-scale CRISPR library (MKO), Thy1.1 surface staining, and FACS analysis. FIG. 6B is a series of FACS plots of naive OT-I; Cas9 CD8+ T cells infection with multiple dilution of MKO lentivirus (Thy1.1 gating) using two batches of viruses collected at different time points. FIG. 6C shows overlaid histograms of Thy1.1 expression of Cas9 CD8+ T cells infected T cells with comparable viral titers from two batches of viruses. Shaded histogram represents uninfected control. Histograms depict MKO library virus isolated 48 hours and 72 hours post-transfection. FIG. 6D shows quantification of MKO lentivirus from two batches of virus by surface staining of Thy1.1-infected CD8+ T cells. Data were shown as geometric mean of MFI. FIG. 6E shows quantification of MKO lentivirus from two batches of virus by surface staining of Thy1.1-infected CD8+ T cells. Data were shown as % Thy1.1+ CD8+ T cells.

[0035] FIG. 7 is a plot illustrating correlation analysis of sgRNA library representation in all samples from the genome-scale screen for trafficking and survival in CD8+ T cells with diverse TCR. Heatmap of pairwise Pearson correlations of sgRNA library representation across all samples in the first WT screen using Cas9 CD8+ T cells that have a diverse TCR repertoire. Samples included plasmid library (n=1), cellular libraries of pre-injection library-infected naive CD8+ T cells (n=3), and various organs containing CD8+T_{eff} cells from multiple mice 7 days post-injection (n=7 mice, 62 total samples). Correlations were calculated based on log₂ rpm values. Cell and plasmid samples were highly correlated with each other, while organ samples were most correlated with other organ samples.

[0036] FIG. 8 is a box-dot plot illustrating overall library sgRNA representation in all samples from the genome-scale screen for trafficking and survival in CD8+ T cells with diverse TCR. Shown is overall sgRNA library representation in all samples, including plasmid library (n=1), cellular libraries of pre-injection library-infected naive CD8+ T cells (n=3), and various organs containing CD8+T_{eff} cells from multiple mice 7 days post-injection (n=7 mice, 62 total samples). SgRNA representation is depicted in terms of log₂ reads per million (rpm). Analyzed tissues include the lymph node (LN), spleen, brain, liver, lung, muscle, and pancreas.

[0037] FIG. 9 is a heatmap illustrating correlation analysis of genome-scale CRISPR perturbation of OT-I; Cas9 CD8+ T cell survival in WT mice. Heatmap of pairwise Pearson correlations of sgRNA library representation across all samples in the second WT screen using OT-I; Cas9 CD8+ T cells. Samples were from various organs containing CD8+T_{eff} cells from multiple mice 7 days post-injection (n=10 mice, 70 total samples). Correlations were calculated based on log₂ rpm values.

[0038] FIG. 10 is a plot illustrating overall library sgRNA abundance of diverse OT-I; Cas9 CD8+ T cell survival in WT mice. Box-dot plot of overall sgRNA library representation in all samples from various organs containing CD8+T_{eff} cells from multiple mice 7 days post-injection (n=10 mice, 70 total samples). sgRNA representation is depicted in terms of log₂ reads per million (rpm). Analyzed tissues include various lymph nodes (LN), spleen, liver, pancreas, and lung.

[0039] FIGS. 11A-11B are a plot and a series of images illustrating representative histology of tumors derived from E0771 cells expressing cOVA antigen in Rag1^{-/-} mice after adoptive transfer. FIG. 11A is a growth curve of subcutaneous tumors from transplanted E0771-mCh-cOVA cells in Rag1^{-/-} mice following different treatments. PBS control (n=1), adoptive transfer of OT-I; Cas9 CD8⁺ T_{eff} cells infected with vector (n=3), and adoptive transfer of OT-I; Cas9 CD8⁺ T_{eff} cells infected with MKO (n=5). Arrow indicates the time of adoptive transfer of MKO or vector transduced OT-I; Cas9 CD8⁺ T_{eff} cells. Error bars for certain data points were invisible because the errors were small. Data are shown as mean±s.e.m. FIG. 11B shows full-slide and high-power histology sections stained by hematoxylin and eosin of tumors derived from E0771 cells expressing cOVA antigen in Rag1^{-/-} mice after different treatment conditions. Top group: tumors in mice that were injected with PBS. Middle group: tumors in mice after adoptive transfer of vector-treated activated OT-I; Cas9 CD8⁺ T_{eff} cells.

[0040] Bottom group: tumors in mice after adoptive transfer of MKO mutagenized activated OT-I; Cas9 CD8⁺ T_{eff} cells. In PBS group, tumors were devoid of lymphocytes and showed signatures of rapid proliferation and little cell death. In adoptive transfer groups, tumors were infiltrated by lymphocytes and showed signatures of cell death in large areas. Low magnification image scale bar: 1 mm; high magnification image scale bar: 200 μm.

[0041] FIG. 12 is a series of plots illustrating FACS data for setup experiments of MKO mutagenized activated OT-I; Cas9 CD8⁺ T_{eff} cells in Rag1^{-/-} mice with transplanted tumors expressing cOVA antigen. Representative FACS plots of adoptively transferred T_{eff} cells in draining and non-draining LNs (dLN and ndLN, respectively), spleen, lung, and tumor (TILs) from E0771-mCh-cOVA tumor-bearing Rag1^{-/-} mice. MKO is the genome-scale T cell knockout CRISPR library. Numbers indicate percentage of total cells. Top row: FACS plots from PBS-treated mice. Middle row: FACS plots from mice treated with vector-infected OT-I; Cas9 CD8⁺ T cells. Bottom row: FACS plots from mice treated with MKO-infected OT-I; Cas9 CD8⁺ T cells.

[0042] FIG. 13 is a heatmap illustrating correlation analysis of genome-scale CRISPR perturbation of OT-I; Cas9 CD8⁺ tumor-infiltrating lymphocytes into Rag1^{-/-} mice with E0771-cOVA tumors. Heatmap of pairwise Pearson correlations of sgRNA library representation across 3 cell libraries prior to injection, and all samples in the tumor infiltration screen (n=10 mice, 10 tumors). Correlations were calculated based on log₂ rpm values. E0771-cOVA cells were transplanted subcutaneously for mice 1-5, and into the mammary fat pad for mice 6-10.

[0043] FIG. 14 is a heatmap illustrating differentially expressed genes in sgDhx37-treated CD8⁺ tumor infiltrating lymphocytes compared to vector-treated. Heatmap of top differentially expressed genes (absolute log₂ fold change≥1) in single CD8⁺ tumor infiltrating lymphocytes treated with sgDhx37 or vector control. Values shown are in terms of z-scores (scaled by row/gene).

[0044] FIGS. 15A-15DD are a series of tables illustrating the sgRNA sequences targeting human genes of top hits identified in the T cell screens herein, such as sg-DHX37, sg-LEXM, sg-FAM103A1, sg-ODC1, and sg-SLC35C1.

### DETAILED DESCRIPTION

### Definitions

[0045] Unless defined otherwise, all technical and scientific terms used herein have the same meaning as commonly understood by one of ordinary skill in the art to which the invention pertains. Although any methods and materials similar or equivalent to those described herein can be used in the practice for testing of the present invention, the preferred materials and methods are described herein. In describing and claiming the present invention, the following terminology will be used.

[0046] It is also to be understood that the terminology used herein is for the purpose of describing particular embodiments only, and is not intended to be limiting.

[0047] The articles “a” and “an” are used herein to refer to one or to more than one (i.e., to at least one) of the grammatical object of the article. By way of example, “an element” means one element or more than one element.

[0048] “About” as used herein when referring to a measurable value such as an amount, a temporal duration, and the like, is meant to encompass variations of ±20% or ±10%, more preferably ±5%, even more preferably ±1%, and still more preferably ±0.1% from the specified value, as such variations are appropriate to perform the disclosed methods.

[0049] As used herein the term “amount” refers to the abundance or quantity of a constituent in a mixture.

[0050] As used herein, the term “bp” refers to base pair.

[0051] The term “complementary” refers to the degree of anti-parallel alignment between two nucleic acid strands. Complete complementarity requires that each nucleotide be across from its opposite. No complementarity requires that each nucleotide is not across from its opposite. The degree of complementarity determines the stability of the sequences to be together or anneal/hybridize. Furthermore various DNA repair functions as well as regulatory functions are based on base pair complementarity.

[0052] The term “CRISPR/Cas” or “clustered regularly interspaced short palindromic repeats” or “CRISPR” refers to DNA loci containing short repetitions of base sequences followed by short segments of spacer DNA from previous exposures to a virus or plasmid.

[0053] Bacteria and archaea have evolved adaptive immune defenses termed CRISPR/CRISPR-associated (Cas) systems that use short RNA to direct degradation of foreign nucleic acids. In bacteria, the CRISPR system provides acquired immunity against invading foreign DNA via RNA-guided DNA cleavage.

[0054] The “CRISPR/Cas9” system or “CRISPR/Cas9-mediated gene editing” refers to a type II CRISPR/Cas system that has been modified for genome editing/engineering. It is typically comprised of a “guide” RNA (gRNA) and a non-specific CRISPR-associated endonuclease (Cas9). “Guide RNA (gRNA)” is used interchangeably herein with “short guide RNA (sgRNA)” or “single guide RNA” (sgRNA). The sgRNA is a short synthetic RNA composed of a “scaffold” sequence necessary for Cas9-binding and a user-defined ˜20 nucleotide “spacer” or “targeting” sequence which defines the genomic target to be modified. The genomic target of Cas9 can be modified by changing the targeting sequence present in the sgRNA.

[0055] The term “cleavage” refers to the breakage of covalent bonds, such as in the backbone of a nucleic acid molecule or the hydrolysis of peptide bonds. Cleavage can be initiated by a variety of methods, including, but not limited to, enzymatic or chemical hydrolysis of a phosphodiester bond. Both single-stranded cleavage and double-stranded cleavage are possible. Double-stranded cleavage can occur as a result of two distinct single-stranded cleavage events. DNA cleavage can result in the production of either blunt ends or staggered ends. In certain embodiments, fusion polypeptides can be used for targeting cleaved double-stranded DNA.

[0056] A “disease” is a state of health of an animal wherein the animal cannot maintain homeostasis, and wherein if the disease is not ameliorated then the animal's health continues to deteriorate. In contrast, a “disorder” in an animal is a state of health in which the animal is able to maintain homeostasis, but in which the animal's state of health is less favorable than it would be in the absence of the disorder. Left untreated, a disorder does not necessarily cause a further decrease in the animal's state of health.

[0057] “Effective amount” or “therapeutically effective amount” are used interchangeably herein, and refer to an amount of a compound, formulation, material, or composition, as described herein effective to achieve a particular biological result or provides a therapeutic or prophylactic benefit. Such results may include, but are not limited to, anti-tumor activity as determined by any means suitable in the art.

[0058] “Encoding” refers to the inherent property of specific sequences of nucleotides in a polynucleotide, such as a gene, a cDNA, or an mRNA, to serve as templates for synthesis of other polymers and macromolecules in biological processes having either a defined sequence of nucleotides (i.e., rRNA, tRNA and mRNA) or a defined sequence of amino acids and the biological properties resulting therefrom. Thus, a gene encodes a protein if transcription and translation of mRNA corresponding to that gene produces the protein in a cell or other biological system. Both the coding strand, the nucleotide sequence of which is identical to the mRNA sequence and is usually provided in sequence listings, and the non-coding strand, used as the template for transcription of a gene or cDNA, can be referred to as encoding the protein or other product of that gene or cDNA.

[0059] As used herein “endogenous” refers to any material from or produced inside an organism, cell, tissue or system.

[0060] The term “expression” as used herein is defined as the transcription and/or translation of a particular nucleotide sequence driven by its promoter.

[0061] “Expression vector” refers to a vector comprising a recombinant polynucleotide comprising expression control sequences operatively linked to a nucleotide sequence to be expressed. An expression vector comprises sufficient cis-acting elements for expression; other elements for expression can be supplied by the host cell or in an in vitro expression system. Expression vectors include all those known in the art, such as cosmids, plasmids (e.g., naked or contained in liposomes) and viruses (e.g., Sendai viruses, lentiviruses, retroviruses, adenoviruses, and adeno-associated viruses) that incorporate the recombinant polynucleotide.

[0062] “Homologous” as used herein, refers to the subunit sequence identity between two polymeric molecules, e.g., between two nucleic acid molecules, such as, two DNA molecules or two RNA molecules, or between two polypeptide molecules. When a subunit position in both of the two molecules is occupied by the same monomeric subunit; e.g., if a position in each of two DNA molecules is occupied by adenine, then they are homologous at that position. The homology between two sequences is a direct function of the number of matching or homologous positions; e.g., if half (e.g., five positions in a polymer ten subunits in length) of the positions in two sequences are homologous, the two sequences are 50% homologous; if 90% of the positions (e.g., 9 of 10), are matched or homologous, the two sequences are 90% homologous.

[0063] “Identity” as used herein refers to the subunit sequence identity between two polymeric molecules particularly between two amino acid molecules, such as, between two polypeptide molecules. When two amino acid sequences have the same residues at the same positions; e.g., if a position in each of two polypeptide molecules is occupied by an Arginine, then they are identical at that position. The identity or extent to which two amino acid sequences have the same residues at the same positions in an alignment is often expressed as a percentage. The identity between two amino acid sequences is a direct function of the number of matching or identical positions; e.g., if half (e.g., five positions in a polymer ten amino acids in length) of the positions in two sequences are identical, the two sequences are 50% identical; if 90% of the positions (e.g., 9 of 10), are matched or identical, the two amino acids sequences are 90% identical.

[0064] As used herein, an “instructional material” includes a publication, a recording, a diagram, or any other medium of expression that can be used to communicate the usefulness of the compositions and methods of the invention. The instructional material of the kit of the invention may, for example, be affixed to a container that contains the nucleic acid, peptide, and/or composition of the invention or be shipped together with a container which contains the nucleic acid, peptide, and/or composition. Alternatively, the instructional material may be shipped separately from the container with the intention that the instructional material and compound be used cooperatively by the recipient.

[0065] “Isolated” means altered or removed from the natural state. For example, a nucleic acid or a peptide naturally present in a living animal is not “isolated,” but the same nucleic acid or peptide partially or completely separated from the coexisting materials of its natural state is “isolated.” An isolated nucleic acid or protein can exist in substantially purified form, or can exist in a non-native environment such as, for example, a host cell.

[0066] The term “knockdown” as used herein refers to a decrease in gene expression of one or more genes.

[0067] The term “knockout” as used herein refers to the ablation of gene expression of one or more genes.

[0068] A “lentivirus” as used herein refers to a genus of the Retroviridae family. Lentiviruses are unique among the retroviruses in being able to infect non-dividing cells; they can deliver a significant amount of genetic information into the DNA of the host cell, so they are one of the most efficient methods of a gene delivery vector. HIV, SIV, and FIV are all examples of lentiviruses. Vectors derived from lentiviruses offer the means to achieve significant levels of gene transfer in vivo.

[0069] By the term “modified” as used herein, is meant a changed state or structure of a molecule or cell of the invention. Molecules may be modified in many ways, including chemically, structurally, and functionally. Cells may be modified through the introduction of nucleic acids.

[0070] By the term “modulating,” as used herein, is meant mediating a detectable increase or decrease in the level of a response in a subject compared with the level of a response in the subject in the absence of a treatment or compound, and/or compared with the level of a response in an otherwise identical but untreated subject. The term encompasses perturbing and/or affecting a native signal or response thereby mediating a beneficial therapeutic response in a subject, preferably, a human.

[0071] A “mutation” as used herein is a change in a DNA sequence resulting in an alteration from a given reference sequence (which may be, for example, an earlier collected DNA sample from the same subject). The mutation can comprise deletion and/or insertion and/or duplication and/or substitution of at least one deoxyribonucleic acid base such as a purine (adenine and/or thymine) and/or a pyrimidine (guanine and/or cytosine). Mutations may or may not produce discernible changes in the observable characteristics (phenotype) of an organism (subject).

[0072] By “nucleic acid” is meant any nucleic acid, whether composed of deoxyribonucleosides or ribonucleosides, and whether composed of phosphodiester linkages or modified linkages such as phosphotriester, phosphoramidate, siloxane, carbonate, carboxymethylester, acetamidate, carbamate, thioether, bridged phosphoramidate, bridged methylene phosphonate, phosphorothioate, methylphosphonate, phosphorodithioate, bridged phosphorothioate or sulfone linkages, and combinations of such linkages. The term nucleic acid also specifically includes nucleic acids composed of bases other than the five biologically occurring bases (adenine, guanine, thymine, cytosine and uracil).

[0073] In the context of the present invention, the following abbreviations for the commonly occurring nucleic acid bases are used. “A” refers to adenosine, “C” refers to cytosine, “G” refers to guanosine, “T” refers to thymidine, and “U” refers to uridine.

[0074] Unless otherwise specified, a “nucleotide sequence encoding an amino acid sequence” includes all nucleotide sequences that are degenerate versions of each other and that encode the same amino acid sequence. The phrase nucleotide sequence that encodes a protein or an RNA may also include introns to the extent that the nucleotide sequence encoding the protein may in some version contain an intron(s).

[0075] The term “oligonucleotide” typically refers to short polynucleotides, generally no greater than about 60 nucleotides. It will be understood that when a nucleotide sequence is represented by a DNA sequence (i.e., A, T, G, C), this also includes an RNA sequence (i.e., A, U, G, C) in which “U” replaces “T”.

[0076] “Parenteral” administration of an immunogenic composition includes, e.g., subcutaneous (s.c.), intravenous (i.v.), intramuscular (i.m.), or intrasternal injection, or infusion techniques.

[0077] The term “polynucleotide” as used herein is defined as a chain of nucleotides. Furthermore, nucleic acids are polymers of nucleotides. Thus, nucleic acids and polynucleotides as used herein are interchangeable. One skilled in the art has the general knowledge that nucleic acids are polynucleotides, which can be hydrolyzed into the monomeric “nucleotides.” The monomeric nucleotides can be hydrolyzed into nucleosides. As used herein polynucleotides include, but are not limited to, all nucleic acid sequences which are obtained by any means available in the art, including, without limitation, recombinant means, i.e., the cloning of nucleic acid sequences from a recombinant library or a cell genome, using ordinary cloning technology and PCR™, and the like, and by synthetic means. Conventional notation is used herein to describe polynucleotide sequences: the left-hand end of a single-stranded polynucleotide sequence is the 5′-end; the left-hand direction of a double-stranded polynucleotide sequence is referred to as the 5′-direction.

[0078] As used herein, the terms “polypeptide,” “peptide,” and “protein” are used interchangeably, and refer to a compound comprised of amino acid residues covalently linked by peptide bonds. A protein or peptide must contain at least two amino acids, and no limitation is placed on the maximum number of amino acids that can comprise a protein's or peptide's sequence. Polypeptides include any peptide or protein comprising two or more amino acids joined to each other by peptide bonds. As used herein, the term refers to both short chains, which also commonly are referred to in the art as peptides, oligopeptides and oligomers, for example, and to longer chains, which generally are referred to in the art as proteins, of which there are many types. “Polypeptides” include, for example, biologically active fragments, substantially homologous polypeptides, oligopeptides, homodimers, heterodimers, variants of polypeptides, modified polypeptides, derivatives, analogs, fusion proteins, among others. The polypeptides include natural peptides, recombinant peptides, synthetic peptides, or a combination thereof.

[0079] The term “promoter” as used herein is defined as a DNA sequence recognized by the synthetic machinery of the cell, or introduced synthetic machinery, required to initiate the specific transcription of a polynucleotide sequence.

[0080] A “sample” or “biological sample” as used herein means a biological material from a subject, including but is not limited to organ, tissue, exosome, blood, plasma, saliva, urine and other body fluid. A sample can be any source of material obtained from a subject.

[0081] As used herein, the terms “sequencing” or “nucleotide sequencing” refer to determining the order of nucleotides (base sequences) in a nucleic acid sample, e.g. DNA or RNA. Many techniques are available such as Sanger sequencing and high-throughput sequencing technologies (also known as next-generation sequencing technologies) such as Illumina's HiSeq and MiSeq platforms or the GS FLX platform offered by Roche Applied Science.

[0082] The term “subject” is intended to include living organisms in which an immune response can be elicited (e.g., mammals). A “subject” or “patient,” as used therein, may be a human or non-human mammal. Non-human mammals include, for example, livestock and pets, such as ovine, bovine, porcine, canine, feline and murine mammals. Preferably, the subject is human.

[0083] A “target site” or “target sequence” refers to a genomic nucleic acid sequence that defines a portion of a nucleic acid to which a binding molecule may specifically bind under conditions sufficient for binding to occur.

[0084] As used herein, the term “T cell receptor” or “TCR” refers to a complex of membrane proteins that participate in the activation of T cells in response to the presentation of antigen. The TCR is responsible for recognizing antigens bound to major histocompatibility complex molecules. TCR is composed of a heterodimer of an alpha (α) and beta (β) chain, although in some cells the TCR consists of gamma and delta (γ/δ) chains. TCRs may exist in α/β and γ/δ forms, which are structurally similar but have distinct anatomical locations and functions. Each chain is composed of two extracellular domains, a variable and constant domain. In some embodiments, the TCR can be modified on any cell comprising a TCR, including, for example, a helper T cell, a cytotoxic T cell, a memory T cell, regulatory T cell, natural killer T cell, and/or gamma delta T cell.

[0085] The term “therapeutic” as used herein means a treatment and/or prophylaxis. A therapeutic effect is obtained by suppression, remission, or eradication of a disease state.

[0086] The term “transfected” or “transformed” or “transduced” as used herein refers to a process by which exogenous nucleic acid is transferred or introduced into the host cell. A “transfected” or “transformed” or “transduced” cell is one that has been transfected, transformed or transduced with exogenous nucleic acid. The cell includes the primary subject cell and its progeny.

[0087] To “treat” a disease as the term is used herein, means to reduce the frequency or severity of at least one sign or symptom of a disease or disorder experienced by a subject.

[0088] A “vector” is a composition of matter which comprises an isolated nucleic acid and which can be used to deliver the isolated nucleic acid to the interior of a cell. Numerous vectors are known in the art including, but not limited to, linear polynucleotides, polynucleotides associated with ionic or amphiphilic compounds, plasmids, and viruses. Thus, the term “vector” includes an autonomously replicating plasmid or a virus. The term should also be construed to include non-plasmid and non-viral compounds which facilitate transfer of nucleic acid into cells, such as, for example, polylysine compounds, liposomes, and the like. Examples of viral vectors include, but are not limited to, Sendai viral vectors, adenoviral vectors, adeno-associated virus vectors, retroviral vectors, lentiviral vectors, and the like.

[0089] Ranges: throughout this disclosure, various aspects of the invention can be presented in a range format. It should be understood that the description in range format is merely for convenience and brevity and should not be construed as an inflexible limitation on the scope of the invention. Accordingly, the description of a range should be considered to have specifically disclosed all the possible subranges as well as individual numerical values within that range. For example, description of a range such as from 1 to 6 should be considered to have specifically disclosed subranges such as from 1 to 3, from 1 to 4, from 1 to 5, from 2 to 4, from 2 to 6, from 3 to 6 etc., as well as individual numbers within that range, for example, 1, 2, 2.7, 3, 4, 5, 5.3, and 6. This applies regardless of the breadth of the range.

### DESCRIPTION

[0090] In the present study, multiple genome-scale in vivo and in vitro CRISPR screens of CD8⁺ cytotoxic T cells were performed to dissect their phenotypes, and quantitative maps of genetic factors modulating important immunological processes such as trafficking, survival, degranulation and tumor infiltration of CD8+ T cells were generated. Dhx37 was one of the top candidates that emerged from multiple screens. Herein, it was demonstrated that targeting this gene with CRISPR leads to significantly enhanced anti-tumor activity. Dhx37 was also mechanistically linked to altered transcriptomes of immunomodulatory and effector genes in tumor-infiltrating lymphocytes (TILs) using single-cell RNAseq.

[0091] The screen was performed in two settings of immunotherapy to assay the abilities of OT-I; Cas9 CD8⁺ effector T cells to infiltrate the tumors and to kill cancer cells upon TCR-antigen encounter. These screens converged on the RNA helicase, Dhx37, which has not been associated with T cell function previously. Engineered OT-I; Cas9 CD8⁺ effector T cells with sgRNAs targeting Dhx37 (sgDhx37) had significantly enhanced anti-tumor activity, resulted in reduced tumor burden, and suppressed relapse in a breast cancer model in mice. Single-cell RNA-sequencing profiled the heterogeneous transcriptomes of sgDhx37 TILs, revealing strong signatures of alterations in immune modulating and effector transcripts, including lymphocyte cell adhesion, interferon-gamma pathway, cytokine production and immune effector genes. These data collectively indicate that Dhx37 inhibition is a novel avenue for immunotherapy, potentially alone or in combination with existing checkpoint blockade agents, and could be rationalized to enhance chimeric antigen receptor (CAR) T cell efficacy.

[0092] The present invention provides, in one aspect, compositions and methods for enhancing T cell based immunotherapy. In certain embodiments, the invention provides modified T cells and inhibitors of Dhx37 for use in enhancing T cell based immunotherapy and/or treating cancer.

### Compositions

[0093] In one aspect, the invention includes a genetically modified T cell wherein a gene selected from the group consisting of Dhx37, Lyn, Slc35c1, Lexm, Fam103a1 and Odc1 has been mutated. In one embodiment, the invention includes a genetically modified T cell wherein the Dhx37 gene has been mutated. The genetically modified T cell can be for use in enhancing T cell based immunotherapy and treating cancer, and can be generated by the methods described herein. The T cell can be of any subtype, including but not limited to CD8+, CD4+, T regulatory (Treg) cells, and CAR-T cells. Additional genes can be mutated in the T cell. In other words, the invention includes a T cell wherein a single gene or multiple genes are mutated. Combinations of genes that can be mutated, include but are not limited to, Dhx37, Lyn, Slc35c1, Lexm, Fam103a1 and Odc1.

[0094] In another aspect, the invention includes an inhibitor of Dhx37. By ‘inhibitor of Dhx37” is meant any compound, construct or other that blocks function or production of Dhx37 at the DNA, RNA, or protein level. This can include but is not limited to any drug, small molecule, antibody, siRNA, or CRISPR system. In one aspect, a CRISPR system comprising a Cas9, and at least one sgRNA complementary to Dhx37, can be used to inhibit Dhx37. In certain embodiments, the sgRNAs are complementary to Dhx37. In certain embodiments, the sgRNA comprises a nucleotide sequence selected from the group consisting of SEQ ID NOs: 1-10. In certain embodiments, the sgRNA comprises a nucleotide sequence selected from the group consisting of SEQ ID NOs: 11-820.

TABLE 1
Mouse sgRNAs

| Mouse sgRNA Name | Sequence | SEQ ID NO: |
|---|---|---|
| mm52368_Dhx37 | AAGTTGCCTACCTATAGCAG | SEQ ID NO: 1 |
| mm52369_Dhx37 | CCTGCTTCGTAGAGAAACTG | SEQ ID NO: 2 |
| mm52370_Dhx37 | ACCAACCTAGGACCAGCACA | SEQ ID NO: 3 |
| mm52371_Dhx37 | ACCTGTTACAGGTTGAGTCG | SEQ ID NO: 4 |
| MKO10014128_Dhx37 | CAAGCTCCCGATCCTCGCCG | SEQ ID NO: 5 |
| MKO10014129_Dhx37 | CTTGCTCCTCGGCGAGGATC | SEQ ID NO: 6 |
| MKO10014130_Dhx37 | TCATCTCGGCCTCCGATACT | SEQ ID NO: 7 |
| MKO10081526_Dhx37 | TTCACGGGGATGAATACAGC | SEQ ID NO: 8 |
| MKO10081527_Dhx37 | GCTTCCGGTGGGCCCCGCTG | SEQ ID NO: 9 |
| MKO10081528_Dhx37 | ACTGAGTGAAGTCCAAGTAT | SEQ ID NO: 10 |

[0095] In another aspect, the invention provides a plurality of sgRNAs targeting human genes of the top hits identified in the T cell screens described herein (FIGS. 15A-15DD). sgRNAs were designed to target human genes including, but not limited to, DHX37, LEXM, FAM103A1, ODC1, and SLC35C1 (SEQ ID NOs: 11-3020).

[0096] In yet another aspect of the invention, antibodies are used to inhibit Dhx37. The antibodies used recognize and bind to at least one epitope listed in Table 2 (SEQ ID NOs: 3022-3031).

>DHX37
(SEQ ID NO: 3021)
MGKLRRRYNIKGRQQAGPGPSKGPPEPPPVQLELEDKDTLKGVDASNALV
LPGKKKKKTKAPPLSKKEKKPLTKKEKKVLQKILEQKEKKSQRAEMLQKL
SEVQASEAEMRLFYTTSKLGTGNRMYHTKEKADEVVAPGQEKISSLSGAH
RKRRRWPSAEEEEEEEEESESELEEESELDEDPAAEPAEAGVGTTVAPLP
PAPAPSSQPVPAGMTVPPPPAAAPPLPRALAKPAVFIPVNRSPEMQEERL
KLPILSEEQVIMEAVAEHPIVIVCGETGSGKTTQVPQFLYEAGFSSEDSI
IGVTEPRRVAAVAMSQRVAKEMNLSQRVVSYQIRYEGNVTEETRIKFMTD
GVLLKEIQKDFLLLRYKVVIIDEAHERSVYTDILIGLLSRIVTLRAKRNL
PLKLLIMSATLRVEDFTQNPRLFAKPPPVIKVESRQFPVTVHFNKRTPLE
DYSGECFRKVCKIHRMLPAGGILVFLTGQAEVHALCRRLRKAFPPSRARP
QEKDDDQKDSVEEMRKFKKSRARAKKARAEVLPQINLDHYSVLPAGEGDE
DREAEVDEEEGALDSDLDLDLGDGGQDGGEQPDASLPLHVLPLYSLLAPE
KQAQVFKPPPEGTRLCVVATNVAETSLTIPGIKYVVDCGKVKKRYYDRVT
GVSSFRVTWVSQASADQRAGRAGRTEPGHCYRLYSSAVFGDFEQFPPPEI
TRRPVEDLILQMKALNVEKVINFPFPTPPSVEALLAAEELLIALGALQPP
QKAERVKQLQENRLSCPITALGRTMATFPVAPRYAKMLALSRQHGCLPYA
ITIVASMTVRELFEELDRPAASDEELTRLKSKRARVAQMKRTWAGQGASL
KLGDLMVLLGAVGACEYASCTPQFCEANGLRYKAMMEIRRLRGQLTTAVN
AVCPEAELFVDPKMQPPTESQVTYLRQIVTAGLGDHLARRVQSEEMLEDK
WRNAYKTPLLDDPVFIHPSSVLFKELPEFVVYQEIVETTKMYMKGVSSVE
VQWIPALLPSYCQFDKPLEEPAPTYCPERGRVLCHRASVFYRVGWPLPAI
EVDFPEGIDRYKHFARFLLEGQVFRKLASYRSCLLSSPGTMLKTWARLQP
RTESLLRALVAEKADCHEALLAAWKKNPKYLLAEYCEWLPQAMHPDIEKA
WPPTTVH

TABLE 2
Epitopes recognized by anti-DHX37 Antibodies

| Rank | Location | Epitope | Score | SEQ ID NO: |
|---|---|---|---|---|
| 1 | 873-892 | QFCEANGLRYKAMMEIRRLR | 1.000 | (SEQ ID NO: 3022) |
| 2 | 623-642 | AETSLTIPGIKYVVDCGKVK | 0.786 | (SEQ ID NO: 3023) |
| 3 | 363-382 | LLRYKVVIIDEAHERSVYTD | 0.749 | (SEQ ID NO: 3024) |
| 4 | 34-53 | LEDKDTLKGVDASNALVLPG | 0.591 | (SEQ ID NO: 3025) |
| 5 | 260-279 | VIMEAVAEHPIVIVCGETGS | 0.532 | (SEQ ID NO: 3026) |
| 6 | 931-950 | AGLGDHLARRVQSEEMLEDK | 0.406 | (SEQ ID NO: 3027) |
| 7 | 309-328 | VAAVAMSQRVAKEMNLSQRV | 0.397 | (SEQ ID NO: 3028) |
| 8 | 226-245 | LPRALAKPAVFIPVNRSPEM | 0.393 | (SEQ ID NO: 3029) |
| 9 | 140-159 | QEKISSLSGAHRKRRRWPSA | 0.386 | (SEQ ID NO: 3030) |
| 10 | 989-1008 | TKMYMKGVSSVEVQWIPALL | 0.385 | (SEQ ID NO: 3031) |

[0097] In yet another aspect, the invention provides a kit comprising an inhibitor of Dhx37, wherein the inhibitor is selected from the group consisting of an antibody, an siRNA, and a CRISPR system. In one embodiment, the CRISPR system comprises a Cas9, and at least one sgRNA complementary to Dhx37. In another embodiment, the sgRNA comprises a nucleotide sequence selected from the group consisting of SEQ ID NOs: 1-10. In another embodiment, the sgRNA comprises a nucleotide sequence selected from the group consisting of SEQ ID NOs: 11-820. In yet another embodiment, the antibody recognizes and binds to at least one epitope sequence selected from the group consisting of SEQ ID NOs: 3022-3031.

[0098] In still another aspect, the invention includes a kit comprising a plurality of sgRNAs comprising the nucleotide sequences selected from the group consisting of SEQ ID NOs: 11-3020.

[0099] Instructional material for use thereof is also included with the kits. Instructional material can include directions for using the components of the kit as well as instructions or guidance for interpreting the results.

### Methods

[0100] In one aspect, the invention includes a method of enhancing T cell based immunotherapy. Another aspect includes a method of performing adoptive cell transfer. Yet another aspect includes a method of treating cancer in a subject. In certain embodiments, the method comprises administering to a subject in need thereof a genetically modified T cell wherein a gene selected from the group consisting of Dhx37, Lyn, Slc35c1, Lexm, Fam103a1 and Odc1 has been mutated in the T cell. In certain embodiments, the method comprises administering to a subject in need thereof a genetically modified T cell wherein the Dhx37 gene has been mutated in the T cell. The T cell can be any subset of T cells, including but not limited to CD8+, CD4+, T regulatory (Treg) cells, and CAR T-cells. In certain embodiments, additional genes are mutated in the T cell. The additional mutated genes can include, but are not limited to, Dhx37, Lyn, Slc35c1, Lexm, Fam103a1 and Odc1.

[0101] Another aspect of the invention includes a method of treating cancer in subject in need thereof comprising administering to the subject a therapeutically effective amount of an inhibitor of Dhx37. The inhibitor can include but is not limited to an antibody, an siRNA, and a CRISPR system. The CRISPR system can comprise a Cas9, and at least one sgRNA complementary to Dhx37 and the sgRNAs can comprise SEQ ID NOs: 1-10. In another embodiment, the sgRNAs are selected from the group consisting of SEQ ID NOs: 11-820. In another embodiment, the antibody recognizes and binds to at least one epitope sequence selected from the group consisting of SEQ ID NOs: 3022-3031.

[0102] Yet another aspect of the invention includes a method of treating cancer in subject in need thereof comprising administering to the subject a therapeutically effective amount of an inhibitor of a gene selected from the group consisting of Lyn, Slc35c1, Lexm, Fam103a1 and Odc. The inhibitor can include but is not limited to an antibody, an siRNA, and a CRISPR system. The CRISPR system can comprise a Cas9, and at least one sgRNA complementary to a gene selected from the group consisting of Lyn, Slc35c1, Lexm, Fam103a1 and Odc. In one embodiment, the sgRNA comprises a nucleotide sequence selected from the group consisting of SEQ ID NOs: 821-3020. Certain embodiments of the methods described herein include administering an additional treatment to the subject. The additional treatment can include immune checkpoint inhibitors, including but not limited to inhibitors of CTLA-4, PD-1, 4-1BB, CD27, CD28, ICOS, LAG3, OX-40, TIM3, and VISTA.

[0103] Another aspect of the invention includes a method of generating a genetically modified T cell for use in immunotherapy. In one embodiment, the method comprises administering to a naïve T cell a vector comprising a first sgRNA complementary to a first nucleotide sequence of the Dhx37 gene and a second sgRNAs complementary to a second nucleotide sequence of the Dhx37 gene. In one embodiment, the method comprises administering to a naïve T cell a vector comprising a first sgRNA complementary to a first nucleotide sequence of a gene selected from the group consisting of Lyn, Slc35c1, Lexm, Fam103a1 and Odc and a second sgRNA complementary to a second nucleotide sequence of a gene selected from the group consisting of Lyn, Slc35c1, Lexm, Fam103a1 and Odc. In one embodiment, the first sgRNA is selected from the group consisting of SEQ ID NOs: 1-10 and the second sgRNA is selected from the group consisting of SEQ ID NOs: 1-10. In another embodiment, the first sgRNA is selected from the group consisting of SEQ ID NOs: 11-820 and the second sgRNA is selected from the group consisting of SEQ ID NOs: 11-820. In one embodiment, the first sgRNA nucleotide sequence is selected from the group consisting of SEQ ID NOs: 821-3020 and the second sgRNA nucleotide sequence is selected from the group consisting of SEQ ID NOs: 821-3020.

[0104] The mutations introduced by the methods described herein can be any combination of insertions or deletions, including but not limited to a single base insertion, a single base deletion, a frameshift, a rearrangement, and an insertion or deletion of 2, 3, 4, 5, 6, 7, 8, 9, 10, 15, 20, 25, 30, 40, 50, 60, 70, 80, 90, 100, 150, 200, 250, 300, any and all numbers in between, bases. The mutation can occur in a gene or in a non-coding region.

[0105] In certain embodiments of the invention, the subject is a human. Other subjects that can be used include but are not limited to mice, rats, rabbits, dogs, cats, horses, pigs, cows and birds. The compositions of the invention can be administered to an animal by any means standard in the art. For example the vectors can be injected into the animal. The injections can be intravenous, subcutaneous, intraperitoneal, or directly into a tissue or organ. In certain embodiments, the genetically modified T cells of the invention are adoptively transferred to the animal.

### CRISPR/Cas9

[0106] The CRISPR/Cas9 system is a facile and efficient system for inducing targeted genetic alterations. Target recognition by the Cas9 protein requires a ‘seed’ sequence within the guide RNA (gRNA) and a conserved dinucleotide containing protospacer adjacent motif (PAI) sequence upstream of the gRNA-binding region. The CRISPR/Cas9 system can thereby be engineered to cleave virtually any DNA sequence by redesigning the gRNA in cell lines (such as 293T cells), primary cells, and CAR T cells. The CRISPR/Cas9 system can simultaneously target multiple genomic loci by co-expressing a single Cas9 protein with two or more gRNAs, making this system uniquely suited for multiple gene editing or synergistic activation of target genes.

[0107] The Cas9 protein and guide RNA form a complex that identifies and cleaves target sequences. Cas9 is comprised of six domains: REC I, REC II, Bridge Helix, PAM interacting, HNH, and RuvC. The RecI domain binds the guide RNA, while the Bridge helix binds to target DNA. The HNH and RuvC domains are nuclease domains. Guide RNA is engineered to have a 5′ end that is complementary to the target DNA sequence. Upon binding of the guide RNA to the Cas9 protein, a conformational change occurs activating the protein.

[0108] Once activated, Cas9 searches for target DNA by binding to sequences that match its protospacer adjacent motif (PAM) sequence. A PAM is a two or three nucleotide base sequence within one nucleotide downstream of the region complementary to the guide RNA.

[0109] In one non-limiting example, the PAM sequence is 5′-NGG-3′. When the Cas9 protein finds its target sequence with the appropriate PAM, it melts the bases upstream of the PAI and pairs them with the complementary region on the guide RNA. Then the RuvC and HNH nuclease domains cut the target DNA after the third nucleotide base upstream of the PAM.

[0110] One non-limiting example of a CRISPR/Cas system used to inhibit gene expression, CRISPRi, is described in U.S. Patent Appl. Publ. No. US20140068797. CRISPRi induces permanent gene disruption that utilizes the RNA-guided Cas9 endonuclease to introduce DNA double stranded breaks, which trigger error-prone repair pathways to result in frame shift mutations. A catalytically dead Cas9 lacks endonuclease activity. When coexpressed with a guide RNA, a DNA recognition complex is generated that specifically interferes with transcriptional elongation, RNA polymerase binding, or transcription factor binding. This CRISPRi system efficiently represses expression of targeted genes.

[0111] CRISPR/Cas gene disruption occurs when a guide nucleotide sequence specific for a target gene and a Cas endonuclease are introduced into a cell and form a complex that enables the Cas endonuclease to introduce a double strand break at the target gene. In certain embodiments, the CRISPR/Cas system comprises an expression vector, such as, but not limited to, an pAd5F35-CRISPR vector. In other embodiments, the Cas expression vector induces expression of Cas9 endonuclease. Other endonucleases may also be used, including but not limited to, T7, Cas3, Cas8a, Cas8b, Cas10d, Cse1, Csy1, Csn2, Cas4, Cas10, Csm2, Cmr5, Fok1, other nucleases known in the art, and any combinations thereof.

[0112] In certain embodiments, inducing the Cas expression vector comprises exposing the cell to an agent that activates an inducible promoter in the Cas expression vector. In such embodiments, the Cas expression vector includes an inducible promoter, such as one that is inducible by exposure to an antibiotic (e.g., by tetracycline or a derivative of tetracycline, for example doxycycline). However, it should be appreciated that other inducible promoters can be used. The inducing agent can be a selective condition (e.g., exposure to an agent, for example an antibiotic) that results in induction of the inducible promoter. This results in expression of the Cas expression vector.

[0113] In certain embodiments, guide RNA(s) and Cas9 can be delivered to a cell as a ribonucleoprotein (RNP) complex. RNPs are comprised of purified Cas9 protein complexed with gRNA and are well known in the art to be efficiently delivered to multiple types of cells, including but not limited to stem cells and immune cells (Addgene, Cambridge, Mass., Mirus Bio LLC, Madison, Wis.).

[0114] The guide RNA is specific for a genomic region of interest and targets that region for Cas endonuclease-induced double strand breaks. The target sequence of the guide RNA sequence may be within a loci of a gene or within a non-coding region of the genome. In certain embodiments, the guide nucleotide sequence is at least 10, 11, 12, 13, 14, 15, 16, 17, 18, 19, 20, 21, 22, 23, 24, 25, 26, 27, 30, 31, 32, 33, 34, 35, 36, 37, 38, 39, 40 or more nucleotides in length.

[0115] Guide RNA (gRNA), also referred to as “short guide RNA” or “sgRNA”, provides both targeting specificity and scaffolding/binding ability for the Cas9 nuclease. The gRNA can be a synthetic RNA composed of a targeting sequence and scaffold sequence derived from endogenous bacterial crRNA and tracrRNA. gRNA is used to target Cas9 to a specific genomic locus in genome engineering experiments. Guide RNAs can be designed using standard tools well known in the art.

[0116] In the context of formation of a CRISPR complex, “target sequence” refers to a sequence to which a guide sequence is designed to have some complementarity, where hybridization between a target sequence and a guide sequence promotes the formation of a CRISPR complex. Full complementarity is not necessarily required, provided there is sufficient complementarity to cause hybridization and promote formation of a CRISPR complex. A target sequence may comprise any polynucleotide, such as a DNA or a RNA polynucleotide. In certain embodiments, a target sequence is located in the nucleus or cytoplasm of a cell. In other embodiments, the target sequence may be within an organelle of a eukaryotic cell, for example, mitochondrion or nucleus. Typically, in the context of an endogenous CRISPR system, formation of a CRISPR complex (comprising a guide sequence hybridized to a target sequence and complexed with one or more Cas proteins) results in cleavage of one or both strands in or near (e.g., within about 1, 2, 3, 4, 5, 6, 7, 8, 9, 10, 20, 50 or more base pairs) the target sequence. As with the target sequence, it is believed that complete complementarity is not needed, provided this is sufficient to be functional.

[0117] In certain embodiments, one or more vectors driving expression of one or more elements of a CRISPR system are introduced into a host cell, such that expression of the elements of the CRISPR system direct formation of a CRISPR complex at one or more target sites. For example, a Cas enzyme, a guide sequence linked to a tracr-mate sequence, and a tracr sequence could each be operably linked to separate regulatory elements on separate vectors. Alternatively, two or more of the elements expressed from the same or different regulatory elements may be combined in a single vector, with one or more additional vectors providing any components of the CRISPR system not included in the first vector. CRISPR system elements that are combined in a single vector may be arranged in any suitable orientation, such as one element located 5′ with respect to (“upstream” of) or 3′ with respect to (“downstream” of) a second element. The coding sequence of one element may be located on the same or opposite strand of the coding sequence of a second element, and oriented in the same or opposite direction. In certain embodiments, a single promoter drives expression of a transcript encoding a CRISPR enzyme and one or more of the guide sequence, tracr mate sequence (optionally operably linked to the guide sequence), and a tracr sequence embedded within one or more intron sequences (e.g., each in a different intron, two or more in at least one intron, or all in a single intron).

[0118] In certain embodiments, the CRISPR enzyme is part of a fusion protein comprising one or more heterologous protein domains (e.g. about or more than about 1, 2, 3, 4, 5, 6, 7, 8, 9, 10, or more domains in addition to the CRISPR enzyme). A CRISPR enzyme fusion protein may comprise any additional protein sequence, and optionally a linker sequence between any two domains. Examples of protein domains that may be fused to a CRISPR enzyme include, without limitation, epitope tags, reporter gene sequences, and protein domains having one or more of the following activities: methylase activity, demethylase activity, transcription activation activity, transcription repression activity, transcription release factor activity, histone modification activity, RNA cleavage activity and nucleic acid binding activity. Additional domains that may form part of a fusion protein comprising a CRISPR enzyme are described in U.S. Patent Appl. Publ. No. US20110059502, which is incorporated herein by reference. In certain embodiments, a tagged CRISPR enzyme is used to identify the location of a target sequence.

[0119] Conventional viral and non-viral based gene transfer methods can be used to introduce nucleic acids in mammalian and non-mammalian cells or target tissues. Such methods can be used to administer nucleic acids encoding components of a CRISPR system to cells in culture, or in a host organism. Non-viral vector delivery systems include DNA plasmids, RNA (e.g., a transcript of a vector described herein), naked nucleic acid, and nucleic acid complexed with a delivery vehicle, such as a liposome. Viral vector delivery systems include DNA and RNA viruses, which have either episomal or integrated genomes after delivery to the cell (Anderson, 1992, Science 256:808-813; and Yu, et al., 1994, Gene Therapy 1:13-26).

[0120] In certain embodiments, the CRISPR/Cas is derived from a type II CRISPR/Cas system. In some embodiments, the CRISPR/Cas system is derived from a Cas9 protein. The Cas9 protein can be from Streptococcus pyogenes, Streptococcus thermophilus, or other species.

[0121] In general, Cas proteins comprise at least one RNA recognition and/or RNA binding domain. RNA recognition and/or RNA binding domains interact with the guiding RNA. Cas proteins can also comprise nuclease domains (i.e., DNase or RNase domains), DNA binding domains, helicase domains, RNAse domains, protein-protein interaction domains, dimerization domains, as well as other domains. The Cas proteins can be modified to increase nucleic acid binding affinity and/or specificity, alter an enzymatic activity, and/or change another property of the protein. In certain embodiments, the Cas-like protein of the fusion protein can be derived from a wild type Cas9 protein or fragment thereof. In other embodiments, the Cas can be derived from modified Cas9 protein. For example, the amino acid sequence of the Cas9 protein can be modified to alter one or more properties (e.g., nuclease activity, affinity, stability, and so forth) of the protein. Alternatively, domains of the Cas9 protein not involved in RNA-guided cleavage can be eliminated from the protein such that the modified Cas9 protein is smaller than the wild type Cas9 protein. In general, a Cas9 protein comprises at least two nuclease (i.e., DNase) domains. For example, a Cas9 protein can comprise a RuvC-like nuclease domain and a HNH-like nuclease domain. The RuvC and HNH domains work together to cut single strands to make a double-stranded break in DNA. (Jinek, et al., 2012, Science, 337:816-821). In certain embodiments, the Cas9-derived protein can be modified to contain only one functional nuclease domain (either a RuvC-like or a HNH-like nuclease domain). For example, the Cas9-derived protein can be modified such that one of the nuclease domains is deleted or mutated such that it is no longer functional (i.e., the nuclease activity is absent). In some embodiments in which one of the nuclease domains is inactive, the Cas9-derived protein is able to introduce a nick into a double-stranded nucleic acid (such protein is termed a “nickase”), but not cleave the double-stranded DNA. In any of the above-described embodiments, any or all of the nuclease domains can be inactivated by one or more deletion mutations, insertion mutations, and/or substitution mutations using well-known methods, such as site-directed mutagenesis, PCR-mediated mutagenesis, and total gene synthesis, as well as other methods known in the art.

[0122] In one non-limiting embodiment, a vector drives the expression of the CRISPR system. The art is replete with suitable vectors that are useful in the present invention. The vectors to be used are suitable for replication and, optionally, integration in eukaryotic cells. Typical vectors contain transcription and translation terminators, initiation sequences, and promoters useful for regulation of the expression of the desired nucleic acid sequence. The vectors of the present invention may also be used for nucleic acid standard gene delivery protocols. Methods for gene delivery are known in the art (U.S. Pat. Nos. 5,399,346, 5,580,859 & 5,589,466, incorporated by reference herein in their entireties).

[0123] Further, the vector may be provided to a cell in the form of a viral vector. Viral vector technology is well known in the art and is described, for example, in Sambrook et al. (4^{th} Edition, Molecular Cloning: A Laboratory Manual, Cold Spring Harbor Laboratory, New York, 2012), and in other virology and molecular biology manuals. Viruses, which are useful as vectors include, but are not limited to, retroviruses, adenoviruses, adeno-associated viruses, herpes viruses, Sindbis virus, gammaretrovirus and lentiviruses. In general, a suitable vector contains an origin of replication functional in at least one organism, a promoter sequence, convenient restriction endonuclease sites, and one or more selectable markers (e.g., WO 01/96584; WO 01/29058; and U.S. Pat. No. 6,326,193).

### Introduction of Nucleic Acids

[0124] Methods of introducing nucleic acids into a cell include physical, biological and chemical methods. Physical methods for introducing a polynucleotide, such as RNA, into a host cell include calcium phosphate precipitation, lipofection, particle bombardment, microinjection, electroporation, and the like. RNA can be introduced into target cells using commercially available methods which include electroporation (Amaxa Nucleofector-II (Amaxa Biosystems, Cologne, Germany)), (ECM 830 (BTX) (Harvard Instruments, Boston, Mass.) or the Gene Pulser II (BioRad, Denver, Colo.), Multiporator (Eppendort, Hamburg Germany). RNA can also be introduced into cells using cationic liposome mediated transfection using lipofection, using polymer encapsulation, using peptide mediated transfection, or using biolistic particle delivery systems such as “gene guns” (see, for example, Nishikawa, et al. Hum Gene Ther., 12(8):861-70 (2001).

[0125] Biological methods for introducing a polynucleotide of interest into a host cell include the use of DNA and RNA vectors. Viral vectors, and especially retroviral vectors, have become the most widely used method for inserting genes into mammalian, e.g., human cells. Other viral vectors can be derived from lentivirus, poxviruses, herpes simplex virus I, adenoviruses and adeno-associated viruses, and the like. See, for example, U.S. Pat. Nos. 5,350,674 and 5,585,362.

[0126] Chemical means for introducing a polynucleotide into a host cell include colloidal dispersion systems, such as macromolecule complexes, nanocapsules, microspheres, beads, and lipid-based systems including oil-in-water emulsions, micelles, mixed micelles, and liposomes. An exemplary colloidal system for use as a delivery vehicle in vitro and in vivo is a liposome (e.g., an artificial membrane vesicle).

[0127] Regardless of the method used to introduce exogenous nucleic acids into a host cell or otherwise expose a cell to the inhibitor of the present invention, in order to confirm the presence of the nucleic acids in the host cell, a variety of assays may be performed. Such assays include, for example, “molecular biological” assays well known to those of skill in the art, such as Southern and Northern blotting, RT-PCR and PCR; “biochemical” assays, such as detecting the presence or absence of a particular peptide, e.g., by immunological means (ELISAs and Western blots) or by assays described herein to identify agents falling within the scope of the invention.

[0128] It should be understood that the method and compositions that would be useful in the present invention are not limited to the particular formulations set forth in the examples. The following examples are put forth so as to provide those of ordinary skill in the art with a complete disclosure and description, and are not intended to limit the scope of what the inventors regard as their invention.

[0129] The practice of the present invention employs, unless otherwise indicated, conventional techniques of molecular biology (including recombinant techniques), microbiology, cell biology, biochemistry and immunology, which are well within the purview of the skilled artisan. Such techniques are explained fully in the literature, such as, Molecular Cloning: A Laboratory Manual”, fourth edition (Sambrook et al. (2012) Molecular Cloning, Cold Spring Harbor Laboratory); “Oligonucleotide Synthesis” (Gait, M. J. (1984). Oligonucleotide synthesis. IRL press); “Culture of Animal Cells” (Freshney, R. (2010). Culture of animal cells. Cell Proliferation, 15(2.3), 1); “Methods in Enzymology” “Weir's Handbook of Experimental Immunology” (Wiley-Blackwell; 5 edition (Jan. 15, 1996); “Gene Transfer Vectors for Mammalian Cells” (Miller and Carlos, (1987) Cold Spring Harbor Laboratory, New York); “Short Protocols in Molecular Biology” (Ausubel et al., Current Protocols; 5 edition (Nov. 5, 2002)); “Polymerase Chain Reaction: Principles, Applications and Troubleshooting”, (Babar, M., VDM Verlag Dr. Müller (Aug. 17, 2011)); “Current Protocols in Immunology” (Coligan, John Wiley & Sons, Inc. Nov. 1, 2002).

[0130] Those skilled in the art will recognize, or be able to ascertain using no more than routine experimentation, numerous equivalents to the specific procedures, embodiments, claims, and examples described herein. Such equivalents were considered to be within the scope of this invention and covered by the claims appended hereto. For example, it should be understood, that modifications in reaction conditions, including but not limited to reaction times, reaction size/volume, and experimental reagents, such as solvents, catalysts, pressures, atmospheric conditions, e.g., nitrogen atmosphere, and reducing/oxidizing agents, with art-recognized alternatives and using no more than routine experimentation, are within the scope of the present application.

[0131] It is to be understood that wherever values and ranges are provided herein, all values and ranges encompassed by these values and ranges, are meant to be encompassed within the scope of the present invention. Moreover, all values that fall within these ranges, as well as the upper or lower limits of a range of values, are also contemplated by the present application.

[0132] The following examples further illustrate aspects of the present invention. However, they are in no way a limitation of the teachings or disclosure of the present invention as set forth herein.

### EXPERIMENTAL EXAMPLES

[0133] The invention is now described with reference to the following Examples. These Examples are provided for the purpose of illustration only, and the invention is not limited to these Examples, but rather encompasses all variations that are evident as a result of the teachings provided herein.

[0134] The materials and methods employed in these experiments are now described.

[0135] Mice: Mice, both sexes, between the ages of 6-12 weeks of age were used for the study. OT-I TCR transgenic mice (OT-I mice) were described by Hogquist et al. (1994) Cell 76, 17-27. Constitutive Cas9-2A-EGFP mice (Cas9 mice) were described by Chu et al. (2016) BMC Biotechnol 16, 4.; Platt et al. (2014) Cell 159, 440-455. OT-I; Cas9 mice were generated by breeding OT-I and Cas9 mice, and genotyped according to Jackson Lab protocol. Naive CD8⁺ T cells were isolated from OT-I mice, Cas9 mice, and OT-I; Cas9 mice. All animals were housed in standard individually ventilated, pathogen-free conditions, with 12 h:12 h or 13 h:11 h light cycle, room temperature (21-23° C.) and 40-60% relative humidity. When a cohort of animals were receiving multiple treatments, animals were randomized by 1) randomly assigning animals to different groups using littermates, 2) random mixing of females prior to treatment, maximizing the evenness or representation of mice from different cages in each group, and/or 3) random assignment of mice to each group, in order to minimize the effect of gender, litter, small difference in age, cage, housing position, where applicable.

[0136] Generation of a T cell CRISPR knockout vector (sgRNA-Thy1.1 Expression Vector): A lentiviral T cell CRISPR knockout vector, lenti-pLKO-U6-sgRNA(BsmBI)-EFS-Thy1.1CO-spA, was generated by codon-optimizing and subcloning Thy1.1 and sgRNA expression cassette into a lentiviral vector via Gibson Assembly.

[0137] Genome-scale mouse T cell CRISPR knockout library cloning: The original mouse CRISPR knockout library, in two sub-libraries (mGeCKOa and mGeCKOb) was from Sanjana et al. (2014) Nat Methods 11, 783-784. mGeCKOa and mGeCKOb were sub-cloned in equal molar, by Gibson assembly and electroporation, into the T cell CRISPR vector to generate the Genome-scale mouse T cell CRISPR knockout library (MKO), with a total of 129,209 sgRNAs including 1,000 non-targeting controls (NTCs). An estimated library coverage of >50× (˜7×10⁶ total colonies) was achieved in electroporation. The library was subsequently sequence-verified by Illumina sequencing. At least 94.1% (121,608/129,209) of unique sgRNAs the whole library cloned, targeting 98.3% (22,375/22,768) of all protein coding genes and microRNAs in the mouse genome, with a tight log-normal distribution representing the vast majority of all designed sgRNAs (90% within 2 orders of magnitude, 99% within 3 orders of magnitude).

[0138] Viral library production: The MKO library plasmid was transfected into low-passage HEK293FT cells at 80% confluency in 15 cm tissue culture plates. Viral supernatant was collected at 48 h and 72 h post-transfection, filtered via a 0.45 m filtration unit (Fisher/VWR), and concentrated using AmiconUltra 100 kD ultracentrifugation units (Millipore), aliquoted and stored in −80° C. until use. Virus for empty vector was produced in a similar manner.

[0139] T cell isolation and culture: Spleens and mesenteric lymph nodes (mLNs) were isolated from various indicated mouse strains, and placed in ice-cold 2% FBS [FBS (Sigma)+RPMI-1640 (Lonza)]. Organs were prepared by mashing through a 100 μm filter. Lymphocytes were suspended in 2% FBS. RBCs were lysed with 1 ml of ACK Lysis Buffer (Lonza) per spleen, incubated for 2 mins at room temperature, and washed with 2% FBS. Lymphocytes were filtered through a 40 μm filter and resuspended with MACS Buffer (PBS+2% FBS+2 μM EDTA). Naive CD8⁺ T cells were isolated using the protocol and kit established by Miltenyi. Naive CD8⁺ T cells were resuspended with cRPMI (RPMI-1640+10% FBS+2 mM L-Glutamine+100 U Pen/Strep (Fisher)+49 nM f-mercaptoethanol (Sigma)) to a final concentration of 1×10⁶ cells/ml. Medium for in vivo experiments was supplemented with 2 ng/ml IL-2+2.5 ng/ml IL-7+50 ng/ml IL-15+1 μg/ml anti-CD28. Medium for in vitro experiments was supplemented with 2 ng/ml IL-2+2 ng/ml IL-12p70+1 μg/ml anti-CD28. Cells were cultured on plates pretreated with 5 μg/ml anti-CD3 and incubated at 37° C. Cytokines and antibodies mentioned above were purchased from BD, Biolegend and eBiosciences.

[0140] T cell transduction, virus titration: T cells were infected in culture immediately after isolation by directly adding concentrated virus into the media. Three days after infection, T cells were stained for Thy1.1 expression and analyzed on FACS. Viral titer was determined for each batch by the number of Thy1.1⁺ T cells normalized to total T cells divided by the volume of virus used. At least 3 doses of viruses with experimental duplicates were used for determining viral titer.

[0141] Antibody and Flow Cytometry: Infectivity of CD8⁺ T cells was assessed via surface staining with anti-CD3 APC, anti-CD8a FITC, and anti-Thy1.1 PE (BioLegend). Cells were stained on ice for 30 mins. Samples were collected on a BD FACSAria cell sorter with 3 lasers, and analyzed using FlowJo software 9.9.4 (Treestar, Ashland, Oreg.) on a MAC® workstation.

[0142] Library-scale viral transduction of T cells: T cells were isolated and cultured as described herein. With the viral titer information, for each infection replicate, a total of >1×10⁸ Cas9 or naive OT-I; Cas9 CD8⁺ T cells were transduced at a MOI of 1 with concentrated lentivirus containing the MKO library described above, to achieve an initial library coverage of >700×. Transduction with the virus containing the empty vector was performed in parallel with a total of >1×10⁷ naive CD8⁺ T cells.

[0143] Adoptive transfer of viral library infected T cells and tissue processing: At day 0 of the culture, naive CD8⁺ T cells were infected with the lentiviral MKO library, and incubated at 37° C. for 3 days. On day 3 of culture, T cells were collected, washed with ice-cold PBS, and resuspended to a final concentration of 5×10⁷ cells/ml. 1×10⁷ cells were injected intravenously into each mouse. C57BL/6 (B6), Cas9, or Rag1^{-/-} mice were used as recipient mice in respective experiments. On 7-day post-transfer, mice were euthanized, and relevant organs were isolated. Skin draining lymph nodes were comprised of inguinal, popliteal, axillary, and brachial lymph nodes. Cervical lymph nodes were comprised of the 6 superficial cervical lymph nodes. Abdominal lymph nodes were comprised of the mesenteric and pancreatic lymph nodes. Other relevant organs isolated were the spleen, liver, pancreas, lung, muscle and brain.

[0144] Generation of a neoantigen expression vector (mCherry-cOVA Expression Vector): A lentiviral mCherry-cOVA (mCh-cOVA) vector, lenti-pLKO-U6-sg(BsmBI)-EFS-mCherry-2A-cOVA, was generated by subcloning cOVA into a mCherry lentiviral vector via Gibson Assembly.

[0145] Generation of stably transfected mCherry-cOVA expressing cell line: E0771 murine breast cancer cells were transduced with mCh-cOVA-expressing lentivirus. After 3 days post-transduction, transduced E0771 cells were cultured individually in 96-well plate by resuspending cells to 10 cells/ml and culturing 100 μl of cell suspension in each well. 2 weeks later, clonal mCh⁺ E0771 clones were identified by fluorescence microscopy. mCh⁺ E0771 clones were stained with established anti-mouse [SIINFEKL: H-2K^{b}] antibody to determine cOVA expression. Different mCh⁺cOVA⁺ clones were selected based on cOVA expression. Clone 3 was chosen for in vivo experiments because of its low, uniform expression of cOVA to select for genes with stronger phenotypes.

[0146] Transplantation of cancer cells into Rag1^{-/-} mice and tissue processing: 5×10⁶ mCh⁺cOVA⁺ E0771 cells were either injected either subcutaneously or into the intra-mammary fat pad of Rag1^{-/-} mice. 10 days post-transplantation, viral library infected T cells were intravenously injected in tumor-bearing Rag1^{-/-} mice. After 7 days, draining lymph nodes, non-draining lymph nodes, spleens, lungs, and tumors were isolated. Samples were prepared for DNA extraction or FACS analysis. Tumors were broken down into smaller fragments, about the size of lentils. Tumors were then dissociated with 1 μg/ml Collagenase IV for 30 minutes using GentleMacs Octo dissociator from Miltenyi, and cell suspensions were passed through 100 μm filter twice before staining.

[0147] Degranulation assay and genome-scale CRISPR screening: Experiments were first optimized by pulsing E0771 cells with varying concentrations of SIINFEKL peptide for 4 hours at 37° C., and subsequently stained with the anti-mouse [SIINFEKL: H-2K^{b}] antibody and analyzed on flow cytometry. The dose of 1 ng/ml was chosen as it represents the maximum concentration tested without being detected by anti-(SIINFEKL: H-2K^{b}). Naive OT-I; Cas9 CD8⁺ T cells were isolated and transduced with MKO lentiviral library. Infected OT-I; Cas9 CD8⁺ T cells were incubated on plates pretreated with 5 μg/ml anti-CD38 in cRPMI supplemented with 2 ng/ml IL-2+2 ng/ml IL-12p70+1 μg/ml anti-CD28 for 6 days. 12 hours before the assay, infected OT-I; Cas9 CD8⁺ T cells were incubated on untreated plates in the presence of 2 ng/ml IL-2+2 ng/ml IL-12 p70 to rest the cells. On day 6, 12 hours before the assay, 1×10⁷ E0771 cells were also plated on 10 cm plate in D10 media (DMEM+10% FBS+100 U Pen/Strep). The following day, E0771 cells were incubated with warm D10 media supplemented with either 0 or 1 ng/ml SIINFEKL peptide for 4 hours. Meanwhile, infected OT-I; Cas9 CD8⁺ T cells were resuspended to a final concentration 1×10⁶ cells/ml with cRPMI+2 nM monensin+anti-CD107a PE antibody, and added to E0771 cells at a T cell: seeding cancer cell ratio=1:1. Cells were coincubated at 37° C. for 2 hours. Cells were then stained with anti-CD8 APC for 30 minutes on ice, and cells were sorted via BD FACSAria. A total of 1×10⁷ T cells were analyzed, and the top 5% CD107a⁺ cells were sorted, and subjected to genomic DNA extraction, CRISPR library readout, and screen data analysis. A total of three biological replicates were performed.

[0148] Genomic DNA extraction from cells and mouse tissues: For gDNA extraction, three methods were used. Method 1: for samples with a total number of less than or equal to 1×10⁵ cells, 100 μl of QuickExtract solution (Epicentre) was directly added to cells and incubated at 65° C. for 30 to 60 minutes until the cell pellets were completely dissolved. Method 2: for cellular samples with a total number of 1×10⁵ to 2×10⁶ cells, or tissue samples from mouse lymph nodes, samples were subjected to QIAamp Fast DNA Tissue Kit (Qiagen) following the manufacturer's protocol. Method 3: for cellular samples with a total number of greater than 2×10⁶ cells, or tissue samples from mouse organs such as spleen, lung, liver, brain, pancreas, colon, or tumor samples, a custom Puregene protocol was used. Briefly, 50-200 mg of frozen ground tissue were resuspended in 6 ml of Lysis Buffer (50 mM Tris, 50 mM EDTA, 1% SDS, pH 8) in a 15 ml conical tube, and 30 μl of 20 mg/ml Proteinase K (Qiagen) were added to the tissue/cell sample and incubated at 55° C. overnight. The next day, 30 μl of 10 mg/ml RNAse A (Qiagen) was added to the lysed sample, which was then inverted 25 times and incubated at 37° C. for 30 minutes. Samples were cooled on ice before addition of 2 ml of pre-chilled 7.5M ammonium acetate (Sigma) to precipitate proteins. The samples were vortexed at high speed for 20 seconds and then centrifuged at ≥4,000×g for 10 minutes. Then, a tight pellet was visible in each tube and the supernatant was carefully decanted into a new 15 ml conical tube. Then 6 ml 100% isopropanol was added to the tube, inverted 50 times and centrifuged at ≥4,000×g for 10 minutes. Genomic DNA was visible as a small white pellet in each tube. The supernatant was discarded, 6 ml of freshly prepared 70% ethanol was added, the tube was inverted 10 times, and then centrifuged at ≥4,000×g for 1 minute. The supernatant was discarded by pouring; the tube was briefly spun, and remaining ethanol was removed using a P200 pipette. After air-drying for 10-30 minutes, the DNA changed appearance from a milky white pellet to slightly translucent. Then, 500 μl of ddH₂O was added, the tube was incubated at 65° C. for 1 hour and at room temperature overnight to fully resuspend the DNA. The next day, the gDNA samples were vortexed briefly. The gDNA concentration was measured using a Nanodrop (Thermo Scientific).

[0149] SgRNA library readout by deep sequencing: The sgRNA library readout was performed using a two-steps PCR strategy, where the first PCR includes enough genomic DNA to preserve full library complexity and the second PCR adds appropriate sequencing adapters to the products from the first PCR.

[0150] For PCR #1, a region containing sgRNA cassette was amplified using primers specific to the T cell CRISPR knockout vector:

Forward
(SEQ ID NO: 3032)
CCCGAGGGGACCCAGAGAG
Reverse
(SEQ ID NO: 3033)
CAATTCCCACTCCTTTCAAGAC

[0151] PCR was performed using Phusion Flash High Fidelity Master Mix (PF) or DreamTaq Green PCR Master Mix (DT) (ThermoFisher). For reactions using PF, in PCR #1, the thermocycling parameters were: 98° C. for 2 min, 18-24 cycles of (98° C. for 1 s, 62° C. for 5 s, 72° C. for 30 s), and 72° C. for 2 minute. For reactions using DT, the thermocycling parameters were adjusted according to manufacturer's protocol. In each PCR #1 reaction, we used 3 μg of total gDNA. For each sample, the appropriate number of PCR #1 reactions was used to capture the full representation of the screen. For example, at ˜200× coverage of our 129,209 MKO sgRNA library, gDNA from 2.5×10⁷ cells was used. Assuming 6.6 μg of gDNA per cell, ˜160 μg of gDNA was used per sample, in approximately 50 PCR #1 reactions (with ˜3 μg of gDNA per reaction).

[0152] PCR #1 products for each biological sample were pooled and used for amplification with barcoded second PCR primers. For each sample, at least 4 PCR #2 reactions were performed using 2 μl of the pooled PCR #1 product per PCR #2 reaction. Second PCR products were pooled and then normalized for each biological sample before combining uniquely barcoded separate biological samples. The pooled product was then gel purified from a 2% E-gel EX (Life Technologies) using the QiaQuick kit (Qiagen). The purified pooled library was then quantified with a gel-based method using the Low-Range Quantitative Ladder Life Technologies, dsDNA High-Sensitivity Qubit (Life Technologies), BioAnalyzer (Agilent) and/or qPCR. Diluted libraries with 5-20% PhiX were sequenced with MiSeq, HiSeq 2500 or HiSeq 4000 systems (Illumina).

[0153] Demultiplexing and readpreprocessing: Raw single-end fastq read files were filtered and demultiplexed using Cutadapt (Martin, (2011) EMBnetjournal 17, 10-12). To remove extra sequences downstream (i.e. 3′ end) of the sgRNA spacer sequences, the following settings were used: cutadapt --discard-untrimmed -a GTTTTAGAGCTAGAAATGGC (SEQ ID NO: 3034). As the forward PCR primers used to readout sgRNA representation were designed to have a variety of barcodes to facilitate multiplexed sequencing, these filtered reads were then demultiplexed with the following settings: cutadapt -g file:fbc.fasta --no-trim, where fbc.fasta contained the 12 possible barcode sequences within the forward primers. Finally, to remove extra sequences upstream (i.e. 5′ end) of the sgRNA spacers, we used the following settings: cutadapt --discard-untrimmed -g GTGGAAAGGACGAAACACCG (SEQ ID NO: 3035). Through this procedure, the raw fastq read files could be pared down to the 20 bp sgRNA spacer sequences.

[0154] Mapping of sgRNA spacers and quantitation of sgRNAs: Having extracted the 20 bp sgRNA spacer sequences from each demultiplexed sample, the sgRNA spacers were then mapped to the MKO library. To do so, a bowtie index was generated of either sgRNA library using the bowtie-build command in Bowtie 1.1.2 (Langmead et al. (2009) Genome Biol 10, R25). Using these bowtie indexes, the filtered fastq read files were mapped using the following settings: bowtie -v 1 --suppress 4,5,6,7 --chunkmbs 2000 -best. Using the resultant mapping output, the number of reads that had mapped to each sgRNA within the library were quantitated. To generate sgRNA representation barplots, a detection threshold of 1 read was set, and the number of unique sgRNAs present in each sample was counted.

[0155] Normalization and summary-level analysis of sgRNA abundances: The number of reads in each sample was normalized by converting raw sgRNA counts to reads per million (rpm). The rpm values were then subject to log₂ transformation for certain analyses. To generate correlation heatmaps, the NMF R package (Gaujoux and Seoighe, (2010) BMC Bioinformatics 11, 367) was used and calculated the Pearson correlations between individual samples using log 2 rpm counts. To calculate the cumulative distribution function for each sample group, the normalized sgRNA counts were first averaged across all samples within a given group. The ecdfplot function in the latticeExtra R package was used to generate empirical cumulative distribution plots.

[0156] Enrichment analysis of sgRNAs: Three criteria were used to identify the top candidate genes: 1) if an sgRNA comprised ≥2% of the total reads in at least one organ sample; 2) if an sgRNA was deemed statistically significantly enriched in ≥20% of all organ samples using a false-discovery rate (FDR) threshold of 0.5% based on the abundances of all non-targeting controls; or 3) if ≥2 independent sgRNAs targeting the same gene were each found to be statistically significant at FDR<0.5% in at least one sample each. For the first and second criteria, individual sgRNA hits were collapsed to genes to facilitate comparisons with the hits from the third criteria.

[0157] Heatmap sgRNA library representation: Heatmaps of the top enriched sgRNAs were generated using the a heatmap function with default setting (NMF R package). Only sgRNAs with a log₂ rpm≥1 were included for visualization in the heatmaps.

[0158] Overlap and significance analysis of enriched sgRNAs: To generate Venn diagrams of overlapping enriched sgRNAs or genes, all sgRNAs were considered that were found to be significant across different statistical calling algorithms, different T cells, or different experiments.

[0159] Gene ontology and pathway enrichment analysis: Various gene sets were used for gene ontology and pathway enrichment analysis using DAVID functional annotation analysis (Huang et al., (2009) Nucleic Acids Res 37, 1-13). For sgRNA set, sgRNAs were converted to their target genes and then the resultant genes were used for analysis.

[0160] Testing anti-tumor function of T cells with sgRNAs targeting individual genes by adoptive transfer: SgRNAs targeting individual genes were cloned into the T cell CRISPR vector. Two independent sgRNAs targeting each gene (e.g. Dhx37) were used (SEQ ID NOs: 1-10). Virus prep and T cell infection were performed as described herein. 5×10⁶ mCh⁺cOVA⁺ E0771 cells were injected either subcutaneously or into the intra-mammary fat pad of Rag1^{-/-} mice. 7 days post-transplantation, freshly isolated naive OT-I; Cas9 CD8⁺ T cells were plated on plates pretreated with 5 μg/ml anti-CD38 in cRPMI supplemented with 2 ng/ml IL-2+2.5 ng/mL IL-7+50 ng/mL IL-15+1 μg/ml anti-CD28, infected with these sgRNA-containing lentiviruses (at MOI of ˜1) as described herein, and cultured for 3 days. 10 days post-transplantation, 5×10⁶ virally infected T cells were intravenously injected in tumor-bearing Rag1^{-/-} mice (T cell: initial cancer cell ratio=1:1). PBS and empty vector infected T cells were used as adoptive transfer controls. Tumor sizes were measured by caliper once to twice per week. 6 weeks after adoptive transfer, tumors were dissected, and samples were subjected to molecular, cellular, histology analysis, or single-cell RNA-seq. For statistical comparison of tumor growth curves, multiple t-tests were performed (Benjamini, Krieger and Yekutieli FDR method) on each timepoint.

[0161] Tumor Infiltration Lymphocyte (TIL) Isolation for single cell RNA-seq: Tumor bearing mice were euthanized at designated time points, and their tumors were collected and kept in ice cold 2% FBS. Tumors were minced into 1-3 mm size pieces using scalpel and then digested in 1 μg/ml Collagenase IV for 30-60 min using Miltenyi GentleMACS Octo Dissociator. Tumor suspensions were filtered twice through 100 μm cell strainer, and again through 40 μm cell strainer to remove large bulk. Subsequently, tumor suspensions were carefully layered onto Ficoll-Paque media (GE Healthcare) and centrifuge at 400 g for 30 min to enrich lymphocytes at the bilayer interface. Cells at the interface were carefully collected, and washed twice with 2% FBS, counted, and stained with indicated antibodies for 30 minutes on ice. CD3⁺CD8⁺ TILs were then sorted on BD FACSAria. A total of 3×10³ to 2×10⁴ TILs were collected per tumor.

[0162] TIL single cell RRNA-seq (scRNAseq): TILs sorted from freshly isolated tumors were subjected to single-cell RNAseq library prep. A protocol by 10× Genomics was followed. In brief, Single Cell Master Mix was prepared fresh containing RT reagent mix, RT primer, additive A, and RT enzyme mix. A Single Cell 3′ Chip was placed in a 10×™ Chip Holder. 50% glycerol solution to each unused well accordingly, TIL solution at ˜100 cell/ul was added together with the master mix. The Single Cell 3′ Gel Bead Strip was placed into a 10×™ Vortex Adapter and vortex for 30 sec. Then, Single Cell 3′ Gel Bead suspension and Partitioning Oil were dispensed into the bottom of the wells in the specified rows. The fully loaded chip was then inserted into Chromium™ Controller to generate emulsion. The emulsion was then transferred to a 96-well PCR plate for GEM-RT reaction, RT clean up, cDNA amplification, cDNA clean up, quantification and QC, and subjected to Illumina library construction. In library construction, clean input cDNA was then subjected to fragmentation, end repair & A-tailing. After that, double sided size selection was performed using SPRI Select, followed by adaptor ligation, clean up, and sample indexing PCR, pooling and PCR cleanup, resulting a single-cell RNA-seq library. Enzymatic Fragmentation and Size Selection were used to optimize the cDNA amplicon size prior to library construction per manufacturer's protocols. R1 (read 1 primer sequence) are added to the molecules during GEM incubation. P5, P7, a sample index and R2 (read 2 primer sequence) are added during library construction via end repair, A-tailing, adaptor ligation and PCR. The Single Cell 3′ Protocol produces Illumina-ready sequencing libraries contain the P5 and P7 primers used in Illumina bridge amplification. This final library was then QC'ed and quantified using BioAnalyzer, and loaded on a Hiseq 2500 RapidRun for standard Illumina paired-end sequencing, where Barcode and 10 bp randomer (UMI) is encoded in Read 1, while Read 2 is used to sequence the cDNA fragment. Sample index sequences are incorporated as the i7 index read.

[0163] TIL scRNA-seq dataprocessing: TIL scRNA-seq_fastq data was pre-processed using established and custom pipelines. Briefly, raw Illumina data files were subjected to Cell Ranger, which used cellranger mkfastq to wrap Illumina's bcl2fastq to correctly demultiplex Chromium-prepared sequencing samples and to convert barcode and read data to FASTQ files. Then, cellranger count was used to take FASTQ files and performs alignment to mouse genome (mm10), filtering, and UMI counting. Raw sequencing output was first preprocessed by Cell Ranger 1.3 (10× Genomics) (Zheng et al., (2017) Nat Commun 8, 14049) using cellranger mkfastq, count, and aggr (no normalization mode). Cells passed the initial quality control metrics imposed by the Cell Ranger pipeline were further filtered using a variety of criteria (Lun et al., (2016) F1000Res 5, 2122): 1) All cells with a total library count (i.e. # of UMIs) that was ≥4 standard deviations below the mean were excluded; 2) All cells with library diversity (i.e. # of detected genes/features) that was ≥4 standard deviations below the mean were excluded; and 3) All cells in which mitochondrial genes disproportionately comprised the total % of the library (≥4 standard deviations above the mean) were excluded. After applying these 3 filters, a final set of cells was retained for further analysis. The 27,998 genes/features were additionally filtered using a flat cutoff metric: genes with an average count of <0.05 across the 12 dataset were excluded. Finally, the data was normalized by library size using the scran R package (Lun et al., (2016) F1000Res 5, 2122).

[0164] scRNA-seq t-SNE dimension reduction and visualization: Using the final normalized and processed dataset, t-SNE dimension reduction was performed using the Rtsne R package with default settings (Maaten, (2014) J Mach Learn Res 15, 3221-3245). Individual data points were colored based on the treatment condition for each cell.

[0165] scRNA-seq differential expression analysis: Using the final normalized and processed dataset, differential expression analysis was performed using the edgeR R package (Robinson et al., (2010) Bioinformatics 26, 139-140). In brief, edgeR first estimates the negative binomial dispersion parameter to model the variance between cells from the same treatment group. A generalized linear model is then fitted to determine differentially expressed genes between treatment conditions. Multiple hypothesis correction was performed by the Benjamini-Hochberg method. Significantly differentially expressed genes were defined as having a Benjamini-Hochberg adjusted p<0.05, with upregulated genes having a positive log fold change and downregulated genes having a negative log fold change. Volcano plots were generated using edgeR output statistics. Gene ontology enrichment analyses on differentially expressed genes were performed using the PANTHER classification system (Mi et al., (2013) Nat Protoc 8, 1551-1566). The statistical overrepresentation test was used to identify enriched GO (biological process) categories among the differentially expressed genes. Bonferroni multiple hypothesis correction was performed.

[0166] scRNA-seq heatmap of differentially expressed genes: To generate an overall view of the top differentially expressed genes, the genes with an absolute log fold change ≥1 were selected. each row of the dataset was then scaled (i.e. by gene) to obtain z-scores. To improve visibility in the heatmap, the dynamic range of the z-scores was compressed to a maximum of 6 (denoted as 6+). Heatmaps were generated using the NMF R package (Gaujoux and Seoighe, (2010) BMC Bioinformatics 11, 367).

[0167] Blinding statement: Investigators were blinded for sequencing data analysis, but not blinded for tumor engraftment, adoptive transfer, organ and tumor dissection, and flow cytometry.

[0168] The results of the experiments are now described.

### Example 1: Genome-Scale T Cell Knockout Library and Genetic Screen for Trafficking and Survival in CD8+ T Cells with Diverse TCR

[0169] To enable CRISPR screen in CD8⁺ T cells, a T cell knockout vector was designed and generated. This vector contained an sgRNA expression cassette enabling genome editing in conjunction with Cas9, and a cassette that expresses a congenic variant of Thy1 protein (Thy1.1) for specific identification and single-cell isolation of transduced CD8⁺ T cells (FIG. 1A). In order to conduct large-scale genetic manipulation and thus high-throughput screening, a genome-scale sgRNA library was cloned into the vector. The sgRNA library contained a total of 129,209 sgRNAs including 128,209 sgRNAs each targeting a gene in the mouse genome, and 1,000 non-targeting controls (NTCs), at an estimated library coverage of >50× (˜7×10⁶ total colonies). Successful cloning of the library was verified (tight log-normal distribution of designed sgRNAs, covering 98.3% targeted genes) by Illumina sequencing. High-titer lentivirus was generated from this sgRNA library (termed MKO thereafter), and it was tested whether they could efficiently transduce cytotoxic T cells. Naive CD8⁺ T cells were isolated from mice that constitutively express Cas9, enabling genetic perturbations upon delivery of sgRNA. T cells were transduced with various concentrations of MKO virus, and analyzed the expression of the Thy1.1 surface marker via flow cytometry three days post-infection (FIG. 1B, FIG. 6A). Efficient transduction of CD8⁺ T cells was detected with various concentrations of MKO virus (FIG. 1C, FIGS. 6B-6E).

[0170] To map the genetic factors modulating the trafficking and survival of diverse T cell populations in vivo, the MKO library was used to interrogate the survival of adoptively transferred mutant T cells after trafficking to relevant organs (FIG. 1). First, freshly isolated naive Cas9 CD8⁺ T cells were mutagenized by transducing with the MKO lentiviral sgRNA library to achieve a coverage of >700× for the initial population, with 3 infection replicates. Three days after transduction, the MKO-infected mutant pool of CD8⁺ T cells (MKO T cell library) were adoptively transferred into wildtype C57BL/6 (B6) recipient mice (n=7) (FIG. 1C). It is expected that after adoptive transfer, T cells in circulation will traffic to lymphoid and non-lymphoid organs in which they will either survive or undergo apoptosis. In order to systematically examine whether T cells traffic to these organs and persist within the tissue microenvironment, the mice were euthanized seven days after adoptive transfer, lymphoid and non-lymphoid organs of interest were isolated, and the sgRNA library representation in each organ sample was sequenced to assess which mutant T cells, relatively how many, and how frequently, survived in vivo. Collected and surveyed were: the liver, pancreas, lung, muscle and brain as representative non-lymphoid organs, as well as the spleen and several types of lymph nodes (LNs) as lymphoid organs (FIG. 1). The LNs collected were divided into three groups: skin draining lymph nodes (sLNs) that comprised of the inguinal, popliteal, axillary, and brachial lymph nodes; cervical lymph nodes (cLNs) that comprised of the 6 superficial lymph nodes; and abdominal lymph nodes (aLNs) that consisted of the mesenteric and the pancreatic lymph nodes (FIG. 1).

[0171] Illumina sequencing successfully read out the sgRNA library representation of the CD8⁺ T cells in all organs, as well as three representative pools of pre-injected MKO-transduced T cells. The library representation in all three replicates of uninjected T cells closely clustered with each other and the MKO plasmid library, whereas the library representation of all organs clustered together (FIG. 7). While the library representation of pre-injected T cells follows a log-normal distribution for both gene-targeting sgRNAs (GTS) and NTCs, the sgRNA representation in organs is characterized by the dominance of a small fraction of sgRNAs (FIG. 8), a signature of clonal expansion of a subset of targeted T cells. While an organ can be dominated by one or a few T cell mutants (e.g. a CD8⁺ T cell clone with an sgRNA targeting Program cell death protein 1 (PD-1/Pdcd1) dominated the aLN sample in mouse 3) (FIG. 1D), a given organ can also consist of multiple highly abundant, but non-dominating clones (FIG. 1D). Monoclonal (one major clone), oligoclonal (2 to 10 major clones each with ≥2% of total reads) and polyclonal (more than 10 clones with 2% or more reads) compositions of T cell variants exist in both lymphoid and non-lymphoid organs (FIG. 1D). These data revealed a global landscape of organ survival for mutant CD8⁺ T cells with a diverse TCR repertoire, and showed that a small subset of the variants from the MKO CD8⁺ T cell pool became highly enriched in vivo after trafficking and survival in a new host for 7 days.

[0172] The library representation within each sample was then analyzed to find enriched sgRNAs compared to the 1,000 NTC sgRNAs. To identify genes whose perturbation might result in enhanced ability of CD8⁺ T_{eff} cells to survive in differential organs in vivo, the sgRNAs and genes represented in the MKO library were ranked using multiple statistical metrics. At a false discovery rate (FDR) of 0.5% or lower, a set of significantly enriched sgRNAs were identified in each organ. Ranking sgRNAs by their prevalence (frequency of being enriched in an organ) (FIG. 1E) revealed dominant signatures of three types of genes: (1) immune genes (such as Lexm BC055111, Socs5, Zap70), consistent with their role in T cells; (2) genes regulating general cell growth and proliferation (e.g. tumor suppressor genes such as Tsc2, Nf1, Pten, and Trp53); as well as (3) genes with undocumented functions in CD8⁺ T cells or largely uncharacterized genes (such as Sgk3, Fam103a1, Phf21a, and 1110057K04Rik) (FIG. 1E). Ranking sgRNAs by the number of independent enriched sgRNAs also revealed these three types of genes, with the top three genes representing three different categories (Cd247—immune, Tsc2—growth, and Bpifb3—unknown) (FIG. 1F). In conjunction with a third criteria, in which a given sgRNA must comprise ≥2% of the reads in a single sample, a total of 11 genes were significantly enriched across all three criteria, again representing immune (Pdcd1, Cd247), growth (Apc, Nf1, Tsc2) and unknown (Csnk1a1, Fam103a1, Fam134b, Phf21a, Prkar1a, and Rab11b) genes (FIG. 1G). Pdcd1, also known as PD-1, is a well-established immune checkpoint regulator expressed on T cells (Ishida et al., 1992), and a major target of checkpoint blockade (Chen and Mellman, 2013). The fact that Pdcd1 passed all three criteria and emerged as a robust hit provided strong evidence for the validity of this approach. Many of the significantly enriched genes are membrane proteins involved in the immune system. Together, these data suggest that perturbation of these genes by CRISPR allows CD8⁺ T_{eff} cells to better survive in lymphoid and non-lymphoid organs in vivo.

### Example 2: Genome-Scale Screen for Trafficking and Survival with Effector CD8⁺ T Cells with Transgenic, Clonal TCR

[0173] Due to the diversity of the TCR repertoire in Cas9 mice, certain genetic effects may be masked by the heterogeneity of the TCR pool. To address this issue and thereby provide a parallel picture in an isogenic setting, the genome-scale CRISPR screen was repeated with a homogenous pool of CD8⁺ T_{eff} cells that expressed the transgenic OT-I TCR, which specifically recognizes the SIINFEKL peptide of chicken ovalbumin (cOVA) presented on H-2K^{b}, a haplotype of MHC-I. Through genetic crosses, a mouse strain (OT-I; Cas9 mice) that expresses both Cas9 and the OT-I transgenic TCRs was generated (FIG. 2A). With these mice, the objective was to identify genes whose perturbation can result in enhanced ability of T_{eff} cells to survive in different organs in vivo following trafficking starting from clonal TCRs. Similarly, naive OT-I; Cas9 CD8⁺ T cells were isolated and mutagenized by transducing with the MKO lentiviral library with 3 infection replicates. Then they were adoptively transferred into wildtype B6 (n=5) or Cas9 (n=5) recipient mice (n=10 total) (FIG. 2A). Seven days post adoptive transfer, the mice were euthanized, relevant lymphoid and non-lymphoid organs collected, and then Illumina sequencing was performed to readout the sgRNA library representation. The sgRNA library representation revealed a global landscape of organ survival for mutant T_{eff} cells with clonal TCR in vivo.

[0174] To identify genes modulating trafficking and survival of OT-I; Cas9 CD8⁺ T_{eff} cells, sgRNAs and genes represented in the MKO library were ranked using multiple statistical metrics. Ranking sgRNAs by their prevalence (frequency of being enriched in an organ) (FIG. 2B) again revealed dominant signatures of three types of genes: (1) immune genes (e.g. BC055111, Hacvr2, Lyn and Pdcd1); (2) growth regulators (e.g. Nf1), although fewer compared to the previous screen; as well as (3) genes with undocumented functions in CD8⁺ T cells or largely uncharacterized genes (e.g. Slc35c1, Siah3, Gjb3, Tmem135 and Shisa6) (FIG. 2B). Havcr2, also known as Tim-3, is a well-established immune checkpoint regulator expressed on T cells (Chen and Flies, 2013), and currently an active target for immunomodulation (Sakuishi et al., 2010). Ranking sgRNAs by the number of independent enriched sgRNAs revealed 4 genes with multiple enriched sgRNAs (mir-463, Pdcd1, Slc35c1, and Stradb) (FIG. 2C). In conjunction with the sgRNA abundance criteria (≥2% of total reads in a sample), a total of 3 genes were significantly enriched across all three criteria (Pdcd1, Slc35c1, and Stradb) (FIG. 2D). These data together suggest that the CRISPR targeting of these genes allows TCR-clonal OT-I; CD8⁺ T_{eff} cells to better survive in lymphoid and non-lymphoid organs in vivo.

[0175] To find which candidate genes can modulate T cell function in both diverse (Cas9 CD8⁺ T cells) and clonal TCR (OT-I; Cas9 CD8⁺ T cells), the gene sets from these two screens were directly compared. A total of 17 genes were identified in both screen as common hits, which again included immune genes (BC055111, Cd247, Hacvr2, and Pdcd1), tumor suppressors (Nf1 and Tsc2), and unknown or uncharacterized genes in T cells (e.g. Gm6927, Slc35c1, Slc2a7, Lrp6, and Zfp82). The emergence of multiple immune genes as mutual top hits, in both diverse TCR and clonal TCR settings, further validated the rigor of this approach, gaining higher confidence for the phenotypes of the unknown genes or those previously not associated with T cell function.

### Example 3: In Vivo Genome-Scale Screen of TCR-Engineered T_{eff} Cells Infiltrating Tumors Expressing a Model Antigen

[0176] After establishing these robust experimental and statistical methodologies, T cell CRISPR screens were performed in immunotherapy settings. To enable T cell recognition of cognate antigen in cancer cells, several clonal cell lines that constitutively express cOVA were generated (FIG. 3A). Using a well-established antibody that recognizes the SIINFEKL: H-2K^{b} complex, it was confirmed that the SIINFEKL peptide was presented on surface H-2K^{b} (FIG. 3B). Clone 3 of E0771-mCherry-cOVA (E0771-mCh-cOVA for short) cell line was chosen for further in vivo studies because it presented a lower level of SIINFEKL peptide on H-2K^{b} (FIG. 3B), thereby enhancing the sensitivity of the screen in order to better detect genes with phenotypes. Despite expressing lower levels of presented SIINFEKL, Clone 5 was not chosen due to its putative bi-modal presentation of SIINFEKL: H-2K^{b} (FIG. 3B). Transplantation of 5×10⁶ clone 3 cells into Rag1^{-/-} mice led to rapid tumor formation in 10 days (FIG. 3C-3D).

[0177] Naive CD8⁺ T cells from OT-I; Cas9 mice were isolated, mutagenized with the MKO sgRNA library, and 1×10⁷ cells adoptively transferred into Rag1^{-/-} mice bearing cOVA-expressing tumors grown from E0771-mCherry-cOVA clone 3 cells (FIG. 3A). Tumor size was measured throughout the experiment. T cell injections (either vector or MKO transduced) mitigated tumor growth, in sharp contrast with PBS (Endpoint tumor size vector vs PBS, unpaired two-sided t-test, p=0.02; MKO vs PBS, p<0.0001) (FIG. 3C). The MKO mutagenized population had a stronger therapeutic effect compared to vector controls (Endpoint tumor size MKO vs vector, unpaired two-sided t-test, p=0.03) (FIG. 3C). This anti-tumor effect also holds in a subcutaneous transplant model, although to a less extent (FIG. 11A). Seven days post-adoptive transfer (17 days after cancer cell transplantation), the mice were euthanized and the tumors isolated for analysis of tumor-infiltrating lymphocytes (TILs). Histological and pathological analysis revealed the existence of lymphocytes in the tumors from mice injected with vector and MKO CD8⁺ T_{eff} cells, but not in tumors of PBS treated mice (FIG. 11B). Flow cytometric analysis (n=3 mice) of single-cell suspensions of organs and tumors detected a large number of CD8+T_{eff} cells in Rag1^{-/-} mice receiving T cell injections but not those receiving PBS (FIG. 12), indicating that the CD8⁺ T_{eff} cells present in these samples were adoptively transferred. Representative tumors from a parallel cohort of mice (n=10) were subjected to high-throughput sgRNA library sequencing (FIG. 3A), which revealed the sgRNA representations of MKO mutagenized OT-I; Cas9 CD8⁺ T_{eff} cells before injection and in all tumor samples (FIG. 3D, FIG. 13).

[0178] Using the same criteria as described previously herein (FDR<0.5%), significantly enriched sgRNAs in each tumor were identified (FIG. 3E, FIG. 10). Ranking sgRNAs by their prevalence across tumors again revealed dominant signatures of immune genes (such as Tim3 Havcr2, BC055111, and Lyn), growth genes (e.g. Nf1), as well as genes with undocumented function in CD8⁺ T cells or generally uncharacterized genes (such as Shisa6, Siah3, Odc1, Dhx37, and 3830406C13Rik) (FIG. 3E). Ranking sgRNAs by the number of independent enriched sgRNAs revealed 26 genes with multiple enriched sgRNAs (FIG. 3F). Notably, two genes (Pdcd1 and Stradb) had 4 enriched sgRNAs, representing independent evidence for their phenotypes (FIG. 3F). After considering a third criteria of sgRNA abundance (≥2% of total reads in a single tumor) representing substantial TIL clones, a total of 6 genes were significantly enriched across all three criteria (Cd247, Fam103a1, Hacvr2, Pdcd1, Prkar1a, and Stradb) (FIG. 3G). These data together suggested that the loss-of-function of these genes make CD8⁺ T_{eff} cells consistently better in terms of tumor infiltration and survival in the tumor microenvironment.

### Example 4: High-Throughput Identification of Genes Modulating Effector CD8+ T Cell Degranulation Upon Encountering Tumor Antigen

[0179] Having observed an anti-tumor effect in vivo, subsequent experiments set out to identify genes that could modulate the ability of CD8⁺ T_{eff} cells to target and kill cancer cells bearing tumor-specific antigen. A degranulation screen was developed using a co-culture system in which OT-I; Cas9 CD8⁺ T_{eff} cells would degranulate in response to E0771 cancer cells presenting SIINFEKL peptide (FIG. 4A). E0771 cells were pulsed with varying concentrations of SIINFEKL peptide, and found to present SIINFEKL peptide on surface MHC-I in a dose-dependent manner (FIG. 4B). To perform a high-throughput CRISPR degranulation screen, naive OT-I; Cas9 CD8⁺ T cells were isolated and transduced with MKO library. The cells were incubated in cRPMI supplemented with IL-2, IL-12, anti-CD28 and anti-CD3 for stimulation for 6 days, rested for 12 hours prior to the experiment on untreated plates, and then the mutagenized CD8⁺ T_{eff} cells were co-cultured with SIINFEKL-pulsed E0771 cells at 1:1 (T cell: cancer cell) ratio. T cells were incubated in media containing anti-CD107a antibody to label the transient deposition of surface CD107a, a marker of T cell granules that is temporarily presented on the cell surface when T cells encounter cognate antigen on MHC. A total of 1×10⁷ T cells per replicate with three biological replicates were analyzed. The top 5% CD107a⁺ cells (FIG. 4C) were sorted then subjected to genomic DNA extraction, CRISPR library readout, and screen data analysis (FIG. 4A). Using the FDR<0.5% significance cutoff, significantly enriched sgRNAs in sorted CD8⁺CD107a⁺ T cells after exposure to SIINFEKL-pulsed E0771 tumor cells in co-culture were identified (FIG. 4D). Remarkably, three genes were significantly enriched in all three samples (Dhx37, Lyn, and Odc1), and they were also found to be significant in the tumor infiltration screen (FIG. 4E). These data together pinpointed Dhx37, Lyn, and Odc1 as promising targets for potentially augmenting anti-tumor activity in vivo by CD8⁺ T cells.

### Example 5: Enhanced Anti-Tumor Function and Single-Cell Transcriptomic Signatures of OT-I; Cas9 CD8+T_{eff} Cells with Dhx37 Perturbation

[0180] The phenotype of Dhx37 was examined in a model of immunotherapy. Two sgRNAs targeting Dhx37 were cloned into the T cell CRISPR vector, and virus prep and T cell infection were performed as described above. 5×10⁶ sg-Dhx37 or vector lentivirus transduced OT-I; Cas9 CD8⁺ T cells were adoptively transferred into mice bearing breast tumors, 10 days post mammary fatpad transplantation of 5×10⁶ clone 3 mCh⁺cOVA⁺E0771 cells. Again, a 1:1 (T cell: cancer cell) ratio was adopted at the time of their respective injections (of note, the cancer cells in a day-10 tumor might largely outnumber 5×10⁶ T cells). Despite initially growing for 3-days post adoptive transfer, the tumors regressed in the ensuing 2.5 weeks (FIG. 4F, left panel). Both vector and sgDhx37 infected OT-I; Cas9 CD8+T_{eff} cells demonstrated strong anti-tumor effects beginning 7 days after adoptive transfer (Vector or sgDhx37 vs PBS, two-sided t-test, adjusted p<0.001 from d17 onwards (Benjamini, Krieger and Yekutieli method)) (FIG. 4F, left panel). As a result, sgDhx37 infected OT-I; Cas9 CD8⁺ T_{eff} cells (n=5 mice) significantly suppressed the relapse when compared to mice treated with vector-infected OT-I; Cas9 CD8⁺ T_{eff} T cells (n=4 mice) (two-sided t-test, adjusted p<0.01 from d37 onwards) (FIG. 4F, right panel). These data demonstrated that targeting Dhx37 with CRISPR/Cas9 and sgRNAs enhanced the anti-tumor effects of OT-I; Cas9 CD8⁺ T_{eff} cells against E0771 tumors expressing cognate antigen cOVA.

[0181] Dhx37 is a DEAH box RNA helicase reported to regulate escape behavior via glycine receptor expression in zebrafish, but has not been previously associated with T cell function in mammalian species. The putative ATP-Dependent RNA Helicase domain and conservation implies that it might affect gene expression and cellular function. To investigate the effect of gene expression alteration upon Dhx37 perturbation, transcriptome analysis of sgDhx37 OT-I; Cas9 CD8⁺ T cells in the form of TILs was performed. Because TILs are in the heterogeneous tumor microenvironment, which might influence the state of TILs leading to highly variable gene expression, single cell RNA-seq (scRNAseq) was used to investigate the transcriptomes of sgDhx37 TILs. Tumor-bearing mice were euthanized and single-cell suspensions generated from tumors by physical dissociation and enzymatic digestion. TILs were collected by staining and sorting the live CD3⁺CD8⁺ cells with FACS. Because TILs only consisted of a tiny fraction of cells in these tumors, the vast majority of single cell suspensions were sorted from whole tumors, and 3×10³ to 2×10⁴ live CD3⁺CD8⁺ TILs were collected per tumor (FIG. 5A). These freshly collected TILs were subjected to an emulsion-based microfluidic device to barcode the CD8⁺ TILs from sgDhx37 and vector groups, and scRNAseq library preparation was performed. The library was sequenced with Illumina Hiseq platform for unique molecular identifiers (UMIs), cellular barcodes, and the transcriptome in each cell was quantified.

[0182] After processing, stringent filtering, and normalizing the raw scRNA-seq data, the final dataset was comprised of 552 cells (sgDhx37, n=191 cells; vector, n=361 cells), measuring a total of 8,244 expressed genes in TILs. t-SNE dimensional reduction was first performed to visualize the overall transcriptomic landscape of these cells (FIG. 5B). From this global view, sgDhx37 and vector-treated TILs spanned a continuum of transcriptomic states, indicating a degree of heterogeneity among the TIL population. Differential expression analysis was subsequently performed between sgDhx37 and vector treated TILs, identifying sets of significantly upregulated and downregulated genes. 215 genes were significantly downregulated in sgDhx37 TILs, while 137 genes were significantly upregulated (Benjamini-Hochberg adjusted p<0.05), with the mostly highly upregulated genes as Rgs16, Tox and Nr4a2 (FIG. 5C). Rgs16 was found as an IL-2-dependent activation gene in human T lymphocytes, and is enriched in activated/effector T cells. Nr4a2 is a nuclear receptor essential for thymic regulatory T cell (T_{reg}) development and homeostasis, and associated with T cell activation, although its specific function in CD8⁺ T cell or TILs is not well characterized. Tox encodes a HMG box protein involved in both CD8+ and CD4⁺ T cell development, to some degree without the requirement of MHC-TCR interactions. Other significantly upregulated genes included known immune-related genes such as Eomes, Nr4a3, Lag3, Ccl4, Ifnar1, and Ikzf2, as well as genes with less knowledge in CD8⁺ T cells or TILs (FIG. 5C). Collectively as a gene set, gene ontology analysis revealed multiple immune-related pathways that were significantly upregulated in sgDhx37 TILs (adjusted p<0.05), including lymphocyte activation, positive regulation of cytokine production, regulation of cell-cell adhesion, regulation of immune effector process, and positive regulation of interferon-gamma production (FIG. 5D). Somewhat intriguingly, sgDhx37 upregulated genes also include genes involved in negative regulation of leukocyte activation such as Ctla4 and Pdcd1, albeit to a lesser extent (approximately 2-fold change), although these genes might have multifaceted roles in a delicate network of immune gene regulation. Taken together, the scRNAseq data revealed significant changes in the transcriptomes of sgDhx37 TILs in the heterogeneous tumor microenvironment at the single-cell level.

### Example 6

[0183] Herein, genome editing was coupled to high-throughput screening approaches, and directly applied to systematically study the trafficking and survival of CD8⁺ T cells in vivo, both in physiological and pathological (cancer) settings. These screens generated large-scale maps of genetic factors modulating the trafficking, survival and tumor infiltration of CD8⁺ T cells, and identified enriched genes belonging to various functional categories including those not documented in literature. Further validation of Dhx37 demonstrated a case that modulation of these hits can lead to enhanced anti-tumor activity in vivo. Single-cell transcriptomic interrogation of sgDhx37 TILs revealed distinct alterations in immune genes signatures. While the current study focused on CD8⁺ T cells, this approach can readily be applied to study other type of T cells such as CD4⁺ T helper cells or T_{regs}. Although the immunotherapy model in this study was based on orthotopic transplantation of breast cancer cells, a variety of cancer models such as genetically engineered mouse models and genome-editing based cancer models for diverse cancer types are all possible alternatives. Utilization of this approach will advance the understanding of genetic control of T cells against cancer, which will have direct implications on CAR-T, checkpoint blockade, or other forms of immunotherapies.

[0184] In summary, CD8⁺ T cells play fundamental roles in the adaptive immune response mounted against intracellular pathogens and tumors, with a central role in the cancer-immune response. Due to the complexity of immunological networks, the highly dynamic tumor microenvironment, and the delicate interplay of cancer cells and immune cells, there may be other important mechanisms and potential therapeutic targets outside of checkpoint inhibitors. The present study demonstrates a proof-of-principle and provides a platform for unbiased discovery in CD8⁺ T cells. This study serves as an early stage reference for high-throughput genetic interrogation of immune cells in vivo, which can be broadly applied for diverse studies in immunology and immunotherapy.

### OTHER EMBODIMENTS

[0185] The recitation of a listing of elements in any definition of a variable herein includes definitions of that variable as any single element or combination (or subcombination) of listed elements. The recitation of an embodiment herein includes that embodiment as any single embodiment or in combination with any other embodiments or portions thereof.

[0186] The disclosures of each and every patent, patent application, and publication cited herein are hereby incorporated herein by reference in their entirety. While this invention has been disclosed with reference to specific embodiments, it is apparent that other embodiments and variations of this invention may be devised by others skilled in the art without departing from the true spirit and scope of the invention. The appended claims are intended to be construed to include all such embodiments and equivalent variations.

1. A method of enhancing T cell based immunotherapy in a subject, the method comprising administering to the subject in need thereof a genetically modified T cell wherein a gene selected from the group consisting of Dhx37, Lyn, Slc35c1, Lexm, Fam103a1 and Odc1 has been mutated in the T cell.

2. The method of claim 1, wherein the T cell is selected from the group consisting of a CD8+, a CD4+, a T regulatory (Treg) cell and a Chimeric Antigen Receptor (CAR)-T cell.

3. The method of claim 1, wherein the subject is a human.

4. The method of claim 1, wherein at least one additional gene has been mutated in the T cell.

5. The method of claim 4, wherein the at least one additional gene is selected from the group consisting of Dhx37, Lyn, Slc35c1, Lexm, Fam103a1 and Odc1.

6. The method of claim 1, further comprising administering an additional treatment to the subject.

7. The method of claim 6, wherein the additional treatment is selected from the group consisting of an immune checkpoint inhibitor, a PD-1 inhibitor, and a CTLA-4 inhibitor.

8. A method of performing adoptive cell transfer therapy in a subject, the method comprising administering to the subject in need thereof a genetically modified T cell, wherein a gene selected from the group consisting of Dhx37, Lyn, Slc35c1, Lexm, Fam103a1 and Odc1 has been mutated in the T cell.

9. The method of claim 8, wherein the T cell is selected from the group consisting of a CD8+, a CD4+, a T regulatory (Treg) cell, and a CAR-T cell.

10. The method of claim 8, wherein the subject is a human.

11. The method of claim 8, wherein at least one additional gene has been mutated in the T cell.

12. The method of claim 11, wherein the at least one additional gene is selected from the group consisting of Dhx37, Lyn, Slc35c1, Lexm, Fam103a1 and Odc1.

13. The method of claim 8, further comprising administering an additional treatment to the subject.

14. The method of claim 13, wherein the additional treatment is selected from the group consisting of an immune checkpoint inhibitor, a PD-1 inhibitor, and a CTLA-4 inhibitor.

15. A method of treating cancer in a subject in need thereof, the method comprising administering to the subject a genetically modified T cell wherein a gene selected from the group consisting of Dhx37, Lyn, Slc35c1, Lexm, Fam103a1 and Odc1 has been mutated in the T cell.

16. The method of claim 15, wherein the T cell is selected from the group consisting of a CD8+, a CD4+, a T regulatory (Treg) cell, and a CAR-T cell.

17. The method of claim 15, wherein the subject is a human.

18. The method of claim 15, wherein at least one additional gene has been mutated in the T cell.

19. The method of claim 18, wherein the at least one additional gene is selected from the group consisting of Dhx37, Lyn, Slc35c1, Lexm, Fam103a1 and Odc1.

20. The method of claim 15, further comprising administering an additional treatment to the subject.

21. The method of claim 20, wherein the additional treatment is selected from the group consisting of an immune checkpoint inhibitor, a PD-1 inhibitor, and a CTLA-4 inhibitor.

22. A method of treating cancer in a subject in need thereof, the method comprising administering to the subject a therapeutically effective amount of an inhibitor of Dhx37.

23. The method of claim 22, wherein the inhibitor is selected from the group consisting of an antibody, an siRNA, and a CRISPR system.

24. The method of claim 23, wherein the CRISPR system comprises a Cas9, and at least one sgRNA complementary to Dhx37.

25. The method of claim 24, wherein the sgRNA comprises a nucleotide sequence selected from the group consisting of SEQ ID NOs: 1-10.

26. The method of claim 24, wherein the sgRNA comprises a nucleotide sequence selected from the group consisting of SEQ ID NOs: 11-820.

27. The method of claim 23, wherein the antibody recognizes and binds to at least one amino acid sequence selected from the group consisting of SEQ ID NOs: 3022-3031.

28. The method of claim 22, further comprising administering an additional treatment to the subject.

29. The method of claim 28, wherein the additional treatment is selected from the group consisting of an immune checkpoint inhibitor, a PD-1 inhibitor, and a CTLA-4 inhibitor.

30. The method of claim 22, further comprising administering to the subject an inhibitor of a gene or gene product selected from the group consisting of Lyn, Slc35c1, Lexm, Fam103a1 and Odc.

31. A method of treating cancer in a subject in need thereof, the method comprising administering to the subject a therapeutically effective amount of an inhibitor of a gene or gene product selected from the group consisting of Lyn, Slc35c1, Lexm, Fam103a1 and Odc.

32. The method of claim 31, wherein the inhibitor is selected from the group consisting of an antibody, an siRNA, and a CRISPR system.

33. The method of claim 32, wherein the CRISPR system comprises a Cas9, and at least one sgRNA complementary to a gene selected from the group consisting of Lyn, Slc35c1, Lexm, Fam103a1 and Odc.

34. The method of claim 33, wherein the sgRNA comprises a nucleotide sequence selected from the group consisting of SEQ ID NOs: 821-3020.

35. The method of claim 31, further comprising administering an additional treatment to the subject.

36. The method of claim 35, wherein the additional treatment is selected from the group consisting of an immune checkpoint inhibitor, a PD-1 inhibitor, and a CTLA-4 inhibitor.

37. A method of generating a genetically modified T cell for use in immunotherapy, the method comprising administering to a naïve T cell a vector comprising a first sgRNA complementary to a first nucleotide sequence of a Dhx37 gene and a second sgRNA complementary to a second nucleotide sequence of the Dhx37 gene.

38. The method of claim 37, wherein the first sgRNA nucleotide sequence is selected from the group consisting of SEQ ID NOs: 1-10 and the second sgRNA nucleotide sequence is selected from the group consisting of SEQ ID NOs: 1-10.

39. The method of claim 37, wherein the first sgRNA nucleotide sequence is selected from the group consisting of SEQ ID NOs: 11-820 and the second sgRNA nucleotide sequence is selected from the group consisting of SEQ ID NOs: 11-820.

40. A method of generating a genetically modified T cell for use in immunotherapy, the method comprising administering to a naïve T cell a vector comprising a first sgRNA complementary to a first nucleotide sequence of a gene selected from the group consisting of Lyn, Slc35c1, Lexm, Fam103a1 and Odc and a second sgRNA complementary to a second nucleotide sequence of a gene selected from the group consisting of Lyn, Slc35c1, Lexm, Fam103a1 and Odc.

41. The method of claim 40, wherein the first sgRNA nucleotide sequence is selected from the group consisting of SEQ ID NOs: 821-3020 and the second sgRNA nucleotide sequence is selected from the group consisting of SEQ ID NOs: 821-3020.

42. A composition comprising a genetically modified T cell generated by the method of claim 37.

43. A composition comprising a genetically modified T cell wherein the Dhx37 gene has been mutated.

44. A composition comprising a genetically modified T cell wherein a gene selected from the group consisting of Lyn, Slc35c1, Lexm, Fam103a1 and Odc has been mutated.

45. A composition comprising an inhibitor of Dhx37, wherein the inhibitor is selected from the group consisting of an antibody, an siRNA, and a CRISPR system.

46. The composition of claim 45, wherein the CRISPR system comprises a Cas9, and at least one sgRNA complementary to Dhx37.

47. The composition of claim 46, wherein the sgRNA comprises the nucleotide sequence selected from the group consisting of SEQ ID NOs: 1-10.

48. The composition of claim 46, wherein the sgRNA comprises the nucleotide sequence selected from the group consisting of SEQ ID NOs: 11-820.

49. The composition of claim 45, wherein the antibody recognizes and binds to at least one amino acid sequence selected from the group consisting of SEQ ID NOs: 3022-3031.

50. A kit comprising an inhibitor of Dhx37, wherein the inhibitor is selected from the group consisting of an antibody, an siRNA, and a CRISPR system, and instructional material for use thereof.

51. The kit of claim 50, wherein the CRISPR system comprises a Cas9, and at least one sgRNA complementary to Dhx37.

52. The kit of claim 51, wherein the at least one sgRNA comprises a nucleotide sequence selected from the group consisting of: SEQ ID NOs: 1-10.

53. The kit of claim 51, wherein the at least one sgRNA comprises a nucleotide sequence selected from the group consisting of: SEQ ID NOs: 11-820.

54. A kit comprising a plurality of sgRNAs comprising the nucleotide sequences selected from the group consisting of SEQ ID NOs: 11-3020 and instructional material for use thereof.

The application's sequence listing, which the Patent Office published only in electronic form, follows.

SEQUENCE LISTING (3035 sequences)

SEQ ID NO: 1 - DNA, 20 bp, Artificial Sequence
  sgRNA
aagttgcctacctatagcag

SEQ ID NO: 2 - DNA, 20 bp, Artificial Sequence
  sgRNA
cctgcttcgtagagaaactg

SEQ ID NO: 3 - DNA, 20 bp, Artificial Sequence
  sgRNA
accaacctaggaccagcaca

SEQ ID NO: 4 - DNA, 20 bp, Artificial Sequence
  sgRNA
acctgttacaggttgagtcg

SEQ ID NO: 5 - DNA, 20 bp, Artificial Sequence
  sgRNA
caagctcccgatcctcgccg

SEQ ID NO: 6 - DNA, 20 bp, Artificial Sequence
  sgRNA
cttgctcctcggcgaggatc

SEQ ID NO: 7 - DNA, 20 bp, Artificial Sequence
  sgRNA
tcatctcggcctccgatact

SEQ ID NO: 8 - DNA, 20 bp, Artificial Sequence
  sgRNA
ttcacggggatgaatacagc

SEQ ID NO: 9 - DNA, 20 bp, Artificial Sequence
  sgRNA
gcttccggtgggccccgctg

SEQ ID NO: 10 - DNA, 20 bp, Artificial Sequence
  sgRNA
actgagtgaagtccaagtat

SEQ ID NO: 11 - DNA, 23 bp, Artificial Sequence
  sgRNA
tgctggctgagtactgtgagtgg

SEQ ID NO: 12 - DNA, 23 bp, Artificial Sequence
  sgRNA
gtactgtgagtggcttccacagg

SEQ ID NO: 13 - DNA, 23 bp, Artificial Sequence
  sgRNA
accccgatatcgagaaagcctgg

SEQ ID NO: 14 - DNA, 23 bp, Artificial Sequence
  sgRNA
ctgtccactgaccagaaacctgg

SEQ ID NO: 15 - DNA, 23 bp, Artificial Sequence
  sgRNA
ctgaccagaaacctggctgcagg

SEQ ID NO: 16 - DNA, 23 bp, Artificial Sequence
  sgRNA
tgaccagaaacctggctgcaggg

SEQ ID NO: 17 - DNA, 23 bp, Artificial Sequence
  sgRNA
gaaacctggctgcagggccgagg

SEQ ID NO: 18 - DNA, 23 bp, Artificial Sequence
  sgRNA
ctggctgcagggccgaggactgg

SEQ ID NO: 19 - DNA, 23 bp, Artificial Sequence
  sgRNA
tgcagggccgaggactggtttgg

SEQ ID NO: 20 - DNA, 23 bp, Artificial Sequence
  sgRNA
gcagggccgaggactggtttggg

SEQ ID NO: 21 - DNA, 23 bp, Artificial Sequence
  sgRNA
cagggccgaggactggtttgggg

SEQ ID NO: 22 - DNA, 23 bp, Artificial Sequence
  sgRNA
ccgaggactggtttggggactgg

SEQ ID NO: 23 - DNA, 23 bp, Artificial Sequence
  sgRNA
aggactggtttggggactggagg

SEQ ID NO: 24 - DNA, 23 bp, Artificial Sequence
  sgRNA
ggactggtttggggactggaggg

SEQ ID NO: 25 - DNA, 23 bp, Artificial Sequence
  sgRNA
tggtttggggactggagggctgg

SEQ ID NO: 26 - DNA, 23 bp, Artificial Sequence
  sgRNA
accgtgcgaccgtgaccacctgg

SEQ ID NO: 27 - DNA, 23 bp, Artificial Sequence
  sgRNA
gcgaccgtgaccacctggcatgg

SEQ ID NO: 28 - DNA, 23 bp, Artificial Sequence
  sgRNA
cgaccgtgaccacctggcatggg

SEQ ID NO: 29 - DNA, 23 bp, Artificial Sequence
  sgRNA
accacctggcatgggcttcgtgg

SEQ ID NO: 30 - DNA, 23 bp, Artificial Sequence
  sgRNA
gggcttcgtggcctgctctcagg

SEQ ID NO: 31 - DNA, 23 bp, Artificial Sequence
  sgRNA
cgtggcctgctctcaggaagtgg

SEQ ID NO: 32 - DNA, 23 bp, Artificial Sequence
  sgRNA
gtggcctgctctcaggaagtggg

SEQ ID NO: 33 - DNA, 23 bp, Artificial Sequence
  sgRNA
tcaggaagtgggtcaagccctgg

SEQ ID NO: 34 - DNA, 23 bp, Artificial Sequence
  sgRNA
caggaagtgggtcaagccctggg

SEQ ID NO: 35 - DNA, 23 bp, Artificial Sequence
  sgRNA
gagagctcgatcccgtatgaagg

SEQ ID NO: 36 - DNA, 23 bp, Artificial Sequence
  sgRNA
agagctcgatcccgtatgaaggg

SEQ ID NO: 37 - DNA, 23 bp, Artificial Sequence
  sgRNA
gtgctgccgcccgtgccatctgg

SEQ ID NO: 38 - DNA, 23 bp, Artificial Sequence
  sgRNA
gccgcccgtgccatctggcccgg

SEQ ID NO: 39 - DNA, 23 bp, Artificial Sequence
  sgRNA
ccgcccgtgccatctggcccggg

SEQ ID NO: 40 - DNA, 23 bp, Artificial Sequence
  sgRNA
cgcccgtgccatctggcccgggg

SEQ ID NO: 41 - DNA, 23 bp, Artificial Sequence
  sgRNA
gcccgtgccatctggcccggggg

SEQ ID NO: 42 - DNA, 23 bp, Artificial Sequence
  sgRNA
tttttgaactgtttattatatgg

SEQ ID NO: 43 - DNA, 23 bp, Artificial Sequence
  sgRNA
ttgaactgtttattatatggtgg

SEQ ID NO: 44 - DNA, 23 bp, Artificial Sequence
  sgRNA
gatgatttcatctcacgtgctgg

SEQ ID NO: 45 - DNA, 23 bp, Artificial Sequence
  sgRNA
gttctgttcagtgtgctctttgg

SEQ ID NO: 46 - DNA, 23 bp, Artificial Sequence
  sgRNA
tggactacattagtcccctgtgg

SEQ ID NO: 47 - DNA, 23 bp, Artificial Sequence
  sgRNA
ttagtcccctgtggagcagcagg

SEQ ID NO: 48 - DNA, 23 bp, Artificial Sequence
  sgRNA
tagtcccctgtggagcagcaggg

SEQ ID NO: 49 - DNA, 23 bp, Artificial Sequence
  sgRNA
cccctgtggagcagcagggctgg

SEQ ID NO: 50 - DNA, 23 bp, Artificial Sequence
  sgRNA
tccccgcccgccctgccagaagg

SEQ ID NO: 51 - DNA, 23 bp, Artificial Sequence
  sgRNA
cccgccctgccagaaggccgagg

SEQ ID NO: 52 - DNA, 23 bp, Artificial Sequence
  sgRNA
gccctgccagaaggccgaggagg

SEQ ID NO: 53 - DNA, 23 bp, Artificial Sequence
  sgRNA
cagaaggccgaggaggcacgtgg

SEQ ID NO: 54 - DNA, 23 bp, Artificial Sequence
  sgRNA
aaggccgaggaggcacgtggagg

SEQ ID NO: 55 - DNA, 23 bp, Artificial Sequence
  sgRNA
aggccgaggaggcacgtggaggg

SEQ ID NO: 56 - DNA, 23 bp, Artificial Sequence
  sgRNA
attcttccctctccagagtcagg

SEQ ID NO: 57 - DNA, 23 bp, Artificial Sequence
  sgRNA
ttcttccctctccagagtcaggg

SEQ ID NO: 58 - DNA, 23 bp, Artificial Sequence
  sgRNA
ttccctctccagagtcagggagg

SEQ ID NO: 59 - DNA, 23 bp, Artificial Sequence
  sgRNA
tccctctccagagtcagggaggg

SEQ ID NO: 60 - DNA, 23 bp, Artificial Sequence
  sgRNA
cagggagggctgcccagccctgg

SEQ ID NO: 61 - DNA, 23 bp, Artificial Sequence
  sgRNA
tcacagccgtcccagatgttagg

SEQ ID NO: 62 - DNA, 23 bp, Artificial Sequence
  sgRNA
tgagctctgtgttgaccttgagg

SEQ ID NO: 63 - DNA, 23 bp, Artificial Sequence
  sgRNA
gagctctgtgttgaccttgaggg

SEQ ID NO: 64 - DNA, 23 bp, Artificial Sequence
  sgRNA
agctctgtgttgaccttgagggg

SEQ ID NO: 65 - DNA, 23 bp, Artificial Sequence
  sgRNA
tgtgttgaccttgaggggcctgg

SEQ ID NO: 66 - DNA, 23 bp, Artificial Sequence
  sgRNA
ttgaccttgaggggcctggctgg

SEQ ID NO: 67 - DNA, 23 bp, Artificial Sequence
  sgRNA
tgaccttgaggggcctggctggg

SEQ ID NO: 68 - DNA, 23 bp, Artificial Sequence
  sgRNA
gaccttgaggggcctggctgggg

SEQ ID NO: 69 - DNA, 23 bp, Artificial Sequence
  sgRNA
accttgaggggcctggctggggg

SEQ ID NO: 70 - DNA, 23 bp, Artificial Sequence
  sgRNA
gggcctggctgggggcccccagg

SEQ ID NO: 71 - DNA, 23 bp, Artificial Sequence
  sgRNA
ccccaggctccatgccttcttgg

SEQ ID NO: 72 - DNA, 23 bp, Artificial Sequence
  sgRNA
cccaggctccatgccttcttggg

SEQ ID NO: 73 - DNA, 23 bp, Artificial Sequence
  sgRNA
aggctccatgccttcttgggagg

SEQ ID NO: 74 - DNA, 23 bp, Artificial Sequence
  sgRNA
ggctccatgccttcttgggaggg

SEQ ID NO: 75 - DNA, 23 bp, Artificial Sequence
  sgRNA
tccatgccttcttgggagggtgg

SEQ ID NO: 76 - DNA, 23 bp, Artificial Sequence
  sgRNA
ccaacgcctttcctgtgttatgg

SEQ ID NO: 77 - DNA, 23 bp, Artificial Sequence
  sgRNA
ctttcctgtgttatggcaacagg

SEQ ID NO: 78 - DNA, 23 bp, Artificial Sequence
  sgRNA
tttcctgtgttatggcaacaggg

SEQ ID NO: 79 - DNA, 23 bp, Artificial Sequence
  sgRNA
tgtgttatggcaacagggagtgg

SEQ ID NO: 80 - DNA, 23 bp, Artificial Sequence
  sgRNA
gtgttatggcaacagggagtggg

SEQ ID NO: 81 - DNA, 23 bp, Artificial Sequence
  sgRNA
gtgggcatctcatctgcctgtgg

SEQ ID NO: 82 - DNA, 23 bp, Artificial Sequence
  sgRNA
gcctgtggtcagctctcagacgg

SEQ ID NO: 83 - DNA, 23 bp, Artificial Sequence
  sgRNA
gtggtcagctctcagacggcagg

SEQ ID NO: 84 - DNA, 23 bp, Artificial Sequence
  sgRNA
tggtcagctctcagacggcaggg

SEQ ID NO: 85 - DNA, 23 bp, Artificial Sequence
  sgRNA
agctctcagacggcagggagcgg

SEQ ID NO: 86 - DNA, 23 bp, Artificial Sequence
  sgRNA
gcagggagcggagctgacgttgg

SEQ ID NO: 87 - DNA, 23 bp, Artificial Sequence
  sgRNA
gagctgacgttggctgtgcttgg

SEQ ID NO: 88 - DNA, 23 bp, Artificial Sequence
  sgRNA
tcaccgctgccatgccgcagagg

SEQ ID NO: 89 - DNA, 23 bp, Artificial Sequence
  sgRNA
ccgcagaggatgcgcctagctgg

SEQ ID NO: 90 - DNA, 23 bp, Artificial Sequence
  sgRNA
cgcagaggatgcgcctagctggg

SEQ ID NO: 91 - DNA, 23 bp, Artificial Sequence
  sgRNA
gaggatgcgcctagctgggctgg

SEQ ID NO: 92 - DNA, 23 bp, Artificial Sequence
  sgRNA
aggatgcgcctagctgggctggg

SEQ ID NO: 93 - DNA, 23 bp, Artificial Sequence
  sgRNA
ggatgcgcctagctgggctgggg

SEQ ID NO: 94 - DNA, 23 bp, Artificial Sequence
  sgRNA
gggccacacgactattatgttgg

SEQ ID NO: 95 - DNA, 23 bp, Artificial Sequence
  sgRNA
actattatgttggccttgaacgg

SEQ ID NO: 96 - DNA, 23 bp, Artificial Sequence
  sgRNA
ctattatgttggccttgaacggg

SEQ ID NO: 97 - DNA, 23 bp, Artificial Sequence
  sgRNA
tattatgttggccttgaacgggg

SEQ ID NO: 98 - DNA, 23 bp, Artificial Sequence
  sgRNA
ttgtctcccttgttcctctgtgg

SEQ ID NO: 99 - DNA, 23 bp, Artificial Sequence
  sgRNA
cccttgttcctctgtggctgagg

SEQ ID NO: 100 - DNA, 23 bp, Artificial Sequence
  sgRNA
ttgttcctctgtggctgaggtgg

SEQ ID NO: 101 - DNA, 23 bp, Artificial Sequence
  sgRNA
tgttcctctgtggctgaggtggg

SEQ ID NO: 102 - DNA, 23 bp, Artificial Sequence
  sgRNA
tcctctgtggctgaggtgggagg

SEQ ID NO: 103 - DNA, 23 bp, Artificial Sequence
  sgRNA
cctctgtggctgaggtgggaggg

SEQ ID NO: 104 - DNA, 23 bp, Artificial Sequence
  sgRNA
ctctgtggctgaggtgggagggg

SEQ ID NO: 105 - DNA, 23 bp, Artificial Sequence
  sgRNA
tctgtggctgaggtgggaggggg

SEQ ID NO: 106 - DNA, 23 bp, Artificial Sequence
  sgRNA
gtggctgaggtgggagggggagg

SEQ ID NO: 107 - DNA, 23 bp, Artificial Sequence
  sgRNA
tggctgaggtgggagggggaggg

SEQ ID NO: 108 - DNA, 23 bp, Artificial Sequence
  sgRNA
ctgaggtgggagggggagggtgg

SEQ ID NO: 109 - DNA, 23 bp, Artificial Sequence
  sgRNA
tgaggtgggagggggagggtggg

SEQ ID NO: 110 - DNA, 23 bp, Artificial Sequence
  sgRNA
gaggtgggagggggagggtgggg

SEQ ID NO: 111 - DNA, 23 bp, Artificial Sequence
  sgRNA
tgggagggggagggtggggtagg

SEQ ID NO: 112 - DNA, 23 bp, Artificial Sequence
  sgRNA
taggtcccccagcaagaaagagg

SEQ ID NO: 113 - DNA, 23 bp, Artificial Sequence
  sgRNA
aggtcccccagcaagaaagaggg

SEQ ID NO: 114 - DNA, 23 bp, Artificial Sequence
  sgRNA
ccccagcaagaaagagggacagg

SEQ ID NO: 115 - DNA, 23 bp, Artificial Sequence
  sgRNA
aagagggacaggagcaccccagg

SEQ ID NO: 116 - DNA, 23 bp, Artificial Sequence
  sgRNA
gggacaggagcaccccaggcagg

SEQ ID NO: 117 - DNA, 23 bp, Artificial Sequence
  sgRNA
gagcaccccaggcaggaccaagg

SEQ ID NO: 118 - DNA, 23 bp, Artificial Sequence
  sgRNA
cccaggcaggaccaaggagtcgg

SEQ ID NO: 119 - DNA, 23 bp, Artificial Sequence
  sgRNA
ccaggcaggaccaaggagtcggg

SEQ ID NO: 120 - DNA, 23 bp, Artificial Sequence
  sgRNA
ggcaggaccaaggagtcgggagg

SEQ ID NO: 121 - DNA, 23 bp, Artificial Sequence
  sgRNA
cccctgccttctgtcctccatgg

SEQ ID NO: 122 - DNA, 23 bp, Artificial Sequence
  sgRNA
gccttctgtcctccatggtgagg

SEQ ID NO: 123 - DNA, 23 bp, Artificial Sequence
  sgRNA
ccttctgtcctccatggtgaggg

SEQ ID NO: 124 - DNA, 23 bp, Artificial Sequence
  sgRNA
gtctccccagagcccagcgctgg

SEQ ID NO: 125 - DNA, 23 bp, Artificial Sequence
  sgRNA
agagcccagcgctggcagaatgg

SEQ ID NO: 126 - DNA, 23 bp, Artificial Sequence
  sgRNA
ggcagaatggattctgctcctgg

SEQ ID NO: 127 - DNA, 23 bp, Artificial Sequence
  sgRNA
tgctcctggctttgcttctgcgg

SEQ ID NO: 128 - DNA, 23 bp, Artificial Sequence
  sgRNA
tggctttgcttctgcggcttcgg

SEQ ID NO: 129 - DNA, 23 bp, Artificial Sequence
  sgRNA
ctttgcttctgcggcttcggtgg

SEQ ID NO: 130 - DNA, 23 bp, Artificial Sequence
  sgRNA
ggcttcggtggagacagttatgg

SEQ ID NO: 131 - DNA, 23 bp, Artificial Sequence
  sgRNA
agacagcatcatcggtgtcacgg

SEQ ID NO: 132 - DNA, 23 bp, Artificial Sequence
  sgRNA
tgtcacggagccccgccgagtgg

SEQ ID NO: 133 - DNA, 23 bp, Artificial Sequence
  sgRNA
gccccgccgagtggccgccgtgg

SEQ ID NO: 134 - DNA, 23 bp, Artificial Sequence
  sgRNA
cgtggccatgtcccagcgagtgg

SEQ ID NO: 135 - DNA, 23 bp, Artificial Sequence
  sgRNA
catgtcccagcgagtggccaagg

SEQ ID NO: 136 - DNA, 23 bp, Artificial Sequence
  sgRNA
cttcctgctgctgcggtacaagg

SEQ ID NO: 137 - DNA, 23 bp, Artificial Sequence
  sgRNA
cctgctgctgcggtacaaggtgg

SEQ ID NO: 138 - DNA, 23 bp, Artificial Sequence
  sgRNA
caaggtggtgatcatcgacgagg

SEQ ID NO: 139 - DNA, 23 bp, Artificial Sequence
  sgRNA
tcatcgacgaggcccacgagagg

SEQ ID NO: 140 - DNA, 23 bp, Artificial Sequence
  sgRNA
ccacgagaggagcgtgtacacgg

SEQ ID NO: 141 - DNA, 23 bp, Artificial Sequence
  sgRNA
gtgtacacggacatcctcatcgg

SEQ ID NO: 142 - DNA, 23 bp, Artificial Sequence
  sgRNA
tgtcccgcattgtgactctccgg

SEQ ID NO: 143 - DNA, 23 bp, Artificial Sequence
  sgRNA
gtcccgcattgtgactctccggg

SEQ ID NO: 144 - DNA, 23 bp, Artificial Sequence
  sgRNA
ggctgacgaggtggtagccccgg

SEQ ID NO: 145 - DNA, 23 bp, Artificial Sequence
  sgRNA
gctgacgaggtggtagccccggg

SEQ ID NO: 146 - DNA, 23 bp, Artificial Sequence
  sgRNA
cgaggtggtagccccgggccagg

SEQ ID NO: 147 - DNA, 23 bp, Artificial Sequence
  sgRNA
gagaagatcagtagcctcagcgg

SEQ ID NO: 148 - DNA, 23 bp, Artificial Sequence
  sgRNA
gtagcctcagcggtgcccaccgg

SEQ ID NO: 149 - DNA, 23 bp, Artificial Sequence
  sgRNA
cccaccggaagcgtcgccgctgg

SEQ ID NO: 150 - DNA, 23 bp, Artificial Sequence
  sgRNA
tcgccgctggccctcagctgagg

SEQ ID NO: 151 - DNA, 23 bp, Artificial Sequence
  sgRNA
ccgctggccctcagctgaggagg

SEQ ID NO: 152 - DNA, 23 bp, Artificial Sequence
  sgRNA
ctggccctcagctgaggaggagg

SEQ ID NO: 153 - DNA, 23 bp, Artificial Sequence
  sgRNA
gccctcagctgaggaggaggagg

SEQ ID NO: 154 - DNA, 23 bp, Artificial Sequence
  sgRNA
ctcagctgaggaggaggaggagg

SEQ ID NO: 155 - DNA, 23 bp, Artificial Sequence
  sgRNA
agctgaggaggaggaggaggagg

SEQ ID NO: 156 - DNA, 23 bp, Artificial Sequence
  sgRNA
tgaggaggaggaggaggaggagg

SEQ ID NO: 157 - DNA, 23 bp, Artificial Sequence
  sgRNA
ggaggaggaggaggaggaggagg

SEQ ID NO: 158 - DNA, 23 bp, Artificial Sequence
  sgRNA
ggaggaggaggaggaggagtcgg

SEQ ID NO: 159 - DNA, 23 bp, Artificial Sequence
  sgRNA
ggaggaggaggagtcggaatcgg

SEQ ID NO: 160 - DNA, 23 bp, Artificial Sequence
  sgRNA
ggaggagtcggaatcggagctgg

SEQ ID NO: 161 - DNA, 23 bp, Artificial Sequence
  sgRNA
ggagtcggaatcggagctggagg

SEQ ID NO: 162 - DNA, 23 bp, Artificial Sequence
  sgRNA
gtcggaatcggagctggaggagg

SEQ ID NO: 163 - DNA, 23 bp, Artificial Sequence
  sgRNA
atcggagctggaggaggagtcgg

SEQ ID NO: 164 - DNA, 23 bp, Artificial Sequence
  sgRNA
gctggaggaggagtcggagctgg

SEQ ID NO: 165 - DNA, 23 bp, Artificial Sequence
  sgRNA
ggaggagtcggagctggacgagg

SEQ ID NO: 166 - DNA, 23 bp, Artificial Sequence
  sgRNA
cgaggacccagctgctgagccgg

SEQ ID NO: 167 - DNA, 23 bp, Artificial Sequence
  sgRNA
cccagctgctgagccggctgagg

SEQ ID NO: 168 - DNA, 23 bp, Artificial Sequence
  sgRNA
gctgctgagccggctgaggctgg

SEQ ID NO: 169 - DNA, 23 bp, Artificial Sequence
  sgRNA
tgagccggctgaggctggtgtgg

SEQ ID NO: 170 - DNA, 23 bp, Artificial Sequence
  sgRNA
gagccggctgaggctggtgtggg

SEQ ID NO: 171 - DNA, 23 bp, Artificial Sequence
  sgRNA
agccggctgaggctggtgtgggg

SEQ ID NO: 172 - DNA, 23 bp, Artificial Sequence
  sgRNA
ggctggtgtggggaccaccgtgg

SEQ ID NO: 173 - DNA, 23 bp, Artificial Sequence
  sgRNA
acccagcagtcagcccgtgccgg

SEQ ID NO: 174 - DNA, 23 bp, Artificial Sequence
  sgRNA
agcagtcagcccgtgccggctgg

SEQ ID NO: 175 - DNA, 23 bp, Artificial Sequence
  sgRNA
gcagtcagcccgtgccggctggg

SEQ ID NO: 176 - DNA, 23 bp, Artificial Sequence
  sgRNA
ctgcagccccaccactgcccagg

SEQ ID NO: 177 - DNA, 23 bp, Artificial Sequence
  sgRNA
tgcagccccaccactgcccaggg

SEQ ID NO: 178 - DNA, 23 bp, Artificial Sequence
  sgRNA
cccaccactgcccagggccctgg

SEQ ID NO: 179 - DNA, 23 bp, Artificial Sequence
  sgRNA
catccccgtgaaccgctccccgg

SEQ ID NO: 180 - DNA, 23 bp, Artificial Sequence
  sgRNA
ggacgacgatcagaaagactcgg

SEQ ID NO: 181 - DNA, 23 bp, Artificial Sequence
  sgRNA
cgacgatcagaaagactcggtgg

SEQ ID NO: 182 - DNA, 23 bp, Artificial Sequence
  sgRNA
cgatcagaaagactcggtggagg

SEQ ID NO: 183 - DNA, 23 bp, Artificial Sequence
  sgRNA
aagactcggtggaggaaatgcgg

SEQ ID NO: 184 - DNA, 23 bp, Artificial Sequence
  sgRNA
tgcggaagtttaagaagtcaagg

SEQ ID NO: 185 - DNA, 23 bp, Artificial Sequence
  sgRNA
gcggaagtttaagaagtcaaggg

SEQ ID NO: 186 - DNA, 23 bp, Artificial Sequence
  sgRNA
agtttaagaagtcaagggccagg

SEQ ID NO: 187 - DNA, 23 bp, Artificial Sequence
  sgRNA
gtttaagaagtcaagggccaggg

SEQ ID NO: 188 - DNA, 23 bp, Artificial Sequence
  sgRNA
gtcaagggccagggccaagaagg

SEQ ID NO: 189 - DNA, 23 bp, Artificial Sequence
  sgRNA
gggccagggccaagaaggcgcgg

SEQ ID NO: 190 - DNA, 23 bp, Artificial Sequence
  sgRNA
ggccagggccaagaaggcgcggg

SEQ ID NO: 191 - DNA, 23 bp, Artificial Sequence
  sgRNA
actcaagctgctcatcatgtcgg

SEQ ID NO: 192 - DNA, 23 bp, Artificial Sequence
  sgRNA
tcatcatgtcggccacgctgcgg

SEQ ID NO: 193 - DNA, 23 bp, Artificial Sequence
  sgRNA
catcatgtcggccacgctgcggg

SEQ ID NO: 194 - DNA, 23 bp, Artificial Sequence
  sgRNA
catgtcggccacgctgcgggtgg

SEQ ID NO: 195 - DNA, 23 bp, Artificial Sequence
  sgRNA
gtcggccacgctgcgggtggagg

SEQ ID NO: 196 - DNA, 23 bp, Artificial Sequence
  sgRNA
aggacttcacccagaacccacgg

SEQ ID NO: 197 - DNA, 23 bp, Artificial Sequence
  sgRNA
gctcttcgccaagccgccgccgg

SEQ ID NO: 198 - DNA, 23 bp, Artificial Sequence
  sgRNA
ctccgaagaacaagtaatcatgg

SEQ ID NO: 199 - DNA, 23 bp, Artificial Sequence
  sgRNA
cgaagaacaagtaatcatggagg

SEQ ID NO: 200 - DNA, 23 bp, Artificial Sequence
  sgRNA
acaagtaatcatggaggctgtgg

SEQ ID NO: 201 - DNA, 23 bp, Artificial Sequence
  sgRNA
caccccatcgtcatcgtgtgtgg

SEQ ID NO: 202 - DNA, 23 bp, Artificial Sequence
  sgRNA
gtcatcgtgtgtggtgagaccgg

SEQ ID NO: 203 - DNA, 23 bp, Artificial Sequence
  sgRNA
gtgtgtggtgagaccggcagcgg

SEQ ID NO: 204 - DNA, 23 bp, Artificial Sequence
  sgRNA
tgtgtggtgagaccggcagcggg

SEQ ID NO: 205 - DNA, 23 bp, Artificial Sequence
  sgRNA
cggcagcgggaagaccacacagg

SEQ ID NO: 206 - DNA, 23 bp, Artificial Sequence
  sgRNA
cctcagtttctctatgaagcagg

SEQ ID NO: 207 - DNA, 23 bp, Artificial Sequence
  sgRNA
tggcatcctggtgttcctgacgg

SEQ ID NO: 208 - DNA, 23 bp, Artificial Sequence
  sgRNA
ggcatcctggtgttcctgacggg

SEQ ID NO: 209 - DNA, 23 bp, Artificial Sequence
  sgRNA
gcatcctggtgttcctgacgggg

SEQ ID NO: 210 - DNA, 23 bp, Artificial Sequence
  sgRNA
cctggtgttcctgacggggcagg

SEQ ID NO: 211 - DNA, 23 bp, Artificial Sequence
  sgRNA
gttcctgacggggcaggctgagg

SEQ ID NO: 212 - DNA, 23 bp, Artificial Sequence
  sgRNA
aggtgcatgcgctgtgccgcagg

SEQ ID NO: 213 - DNA, 23 bp, Artificial Sequence
  sgRNA
atgcgctgtgccgcaggctcagg

SEQ ID NO: 214 - DNA, 23 bp, Artificial Sequence
  sgRNA
gctgtgccgcaggctcaggaagg

SEQ ID NO: 215 - DNA, 23 bp, Artificial Sequence
  sgRNA
ctttcccaccctccagagcccgg

SEQ ID NO: 216 - DNA, 23 bp, Artificial Sequence
  sgRNA
ggagagccttctgcgagccctgg

SEQ ID NO: 217 - DNA, 23 bp, Artificial Sequence
  sgRNA
gcgagccctggttgcagagaagg

SEQ ID NO: 218 - DNA, 23 bp, Artificial Sequence
  sgRNA
tgactgccatgaagccttgctgg

SEQ ID NO: 219 - DNA, 23 bp, Artificial Sequence
  sgRNA
atgaagccttgctggctgcttgg

SEQ ID NO: 220 - DNA, 23 bp, Artificial Sequence
  sgRNA
gctcccgctgtactctctgctgg

SEQ ID NO: 221 - DNA, 23 bp, Artificial Sequence
  sgRNA
ccccagttttgcgaagccaacgg

SEQ ID NO: 222 - DNA, 23 bp, Artificial Sequence
  sgRNA
cccagttttgcgaagccaacggg

SEQ ID NO: 223 - DNA, 23 bp, Artificial Sequence
  sgRNA
tttgcgaagccaacgggctgcgg

SEQ ID NO: 224 - DNA, 23 bp, Artificial Sequence
  sgRNA
gctgcggtacaaagccatgatgg

SEQ ID NO: 225 - DNA, 23 bp, Artificial Sequence
  sgRNA
acaaagccatgatggagatccgg

SEQ ID NO: 226 - DNA, 23 bp, Artificial Sequence
  sgRNA
tgatggagatccggcgcctgcgg

SEQ ID NO: 227 - DNA, 23 bp, Artificial Sequence
  sgRNA
gatggagatccggcgcctgcggg

SEQ ID NO: 228 - DNA, 23 bp, Artificial Sequence
  sgRNA
atggagatccggcgcctgcgggg

SEQ ID NO: 229 - DNA, 23 bp, Artificial Sequence
  sgRNA
acagaagctgagtgaagtccagg

SEQ ID NO: 230 - DNA, 23 bp, Artificial Sequence
  sgRNA
ttttataccacttccaagctagg

SEQ ID NO: 231 - DNA, 23 bp, Artificial Sequence
  sgRNA
accacttccaagctaggcactgg

SEQ ID NO: 232 - DNA, 23 bp, Artificial Sequence
  sgRNA
ccacttccaagctaggcactggg

SEQ ID NO: 233 - DNA, 23 bp, Artificial Sequence
  sgRNA
gtctttaagcctccaccggaggg

SEQ ID NO: 234 - DNA, 23 bp, Artificial Sequence
  sgRNA
tctttaagcctccaccggagggg

SEQ ID NO: 235 - DNA, 23 bp, Artificial Sequence
  sgRNA
agcctccaccggaggggactcgg

SEQ ID NO: 236 - DNA, 23 bp, Artificial Sequence
  sgRNA
ggggactcggttgtgtgttgtgg

SEQ ID NO: 237 - DNA, 23 bp, Artificial Sequence
  sgRNA
gtgtgttgtggccaccaatgtgg

SEQ ID NO: 238 - DNA, 23 bp, Artificial Sequence
  sgRNA
gagacgtcgcttaccatccctgg

SEQ ID NO: 239 - DNA, 23 bp, Artificial Sequence
  sgRNA
catccctggcatcaagtacgtgg

SEQ ID NO: 240 - DNA, 23 bp, Artificial Sequence
  sgRNA
ccctggcatcaagtacgtggtgg

SEQ ID NO: 241 - DNA, 23 bp, Artificial Sequence
  sgRNA
atcaagtacgtggtggactgtgg

SEQ ID NO: 242 - DNA, 23 bp, Artificial Sequence
  sgRNA
tcaagtacgtggtggactgtggg

SEQ ID NO: 243 - DNA, 23 bp, Artificial Sequence
  sgRNA
gtacgtggtggactgtgggaagg

SEQ ID NO: 244 - DNA, 23 bp, Artificial Sequence
  sgRNA
cgctactacgaccgcgtcactgg

SEQ ID NO: 245 - DNA, 23 bp, Artificial Sequence
  sgRNA
tatcctccttccgtgtcacctgg

SEQ ID NO: 246 - DNA, 23 bp, Artificial Sequence
  sgRNA
atcctccttccgtgtcacctggg

SEQ ID NO: 247 - DNA, 23 bp, Artificial Sequence
  sgRNA
ccgtgtcacctgggtctcccagg

SEQ ID NO: 248 - DNA, 23 bp, Artificial Sequence
  sgRNA
ggcatcagctgaccagcgagcgg

SEQ ID NO: 249 - DNA, 23 bp, Artificial Sequence
  sgRNA
gcatcagctgaccagcgagcggg

SEQ ID NO: 250 - DNA, 23 bp, Artificial Sequence
  sgRNA
gaccagcgagcgggcagagcagg

SEQ ID NO: 251 - DNA, 23 bp, Artificial Sequence
  sgRNA
agcgagcgggcagagcaggacgg

SEQ ID NO: 252 - DNA, 23 bp, Artificial Sequence
  sgRNA
agcgggcagagcaggacggacgg

SEQ ID NO: 253 - DNA, 23 bp, Artificial Sequence
  sgRNA
agagcaggacggacggagcccgg

SEQ ID NO: 254 - DNA, 23 bp, Artificial Sequence
  sgRNA
tctctagcgtggaggtccagtgg

SEQ ID NO: 255 - DNA, 23 bp, Artificial Sequence
  sgRNA
cgtggaggtccagtggatcccgg

SEQ ID NO: 256 - DNA, 23 bp, Artificial Sequence
  sgRNA
ctgccagtttgacaagcccctgg

SEQ ID NO: 257 - DNA, 23 bp, Artificial Sequence
  sgRNA
ccagtttgacaagcccctggagg

SEQ ID NO: 258 - DNA, 23 bp, Artificial Sequence
  sgRNA
cccctacatactgccccgagcgg

SEQ ID NO: 259 - DNA, 23 bp, Artificial Sequence
  sgRNA
ccctacatactgccccgagcggg

SEQ ID NO: 260 - DNA, 23 bp, Artificial Sequence
  sgRNA
cctacatactgccccgagcgggg

SEQ ID NO: 261 - DNA, 23 bp, Artificial Sequence
  sgRNA
ctacatactgccccgagcggggg

SEQ ID NO: 262 - DNA, 23 bp, Artificial Sequence
  sgRNA
catactgccccgagcgggggcgg

SEQ ID NO: 263 - DNA, 23 bp, Artificial Sequence
  sgRNA
atactgccccgagcgggggcggg

SEQ ID NO: 264 - DNA, 23 bp, Artificial Sequence
  sgRNA
gggggcgggtgctgtgtcaccgg

SEQ ID NO: 265 - DNA, 23 bp, Artificial Sequence
  sgRNA
ggggcgggtgctgtgtcaccggg

SEQ ID NO: 266 - DNA, 23 bp, Artificial Sequence
  sgRNA
tcctaccagatccggtatgaagg

SEQ ID NO: 267 - DNA, 23 bp, Artificial Sequence
  sgRNA
gtatgaaggaaacgtgacagagg

SEQ ID NO: 268 - DNA, 23 bp, Artificial Sequence
  sgRNA
gaccagaatcaagttcatgacgg

SEQ ID NO: 269 - DNA, 23 bp, Artificial Sequence
  sgRNA
agaatcaagttcatgacggatgg

SEQ ID NO: 270 - DNA, 23 bp, Artificial Sequence
  sgRNA
cacggccggagttggtggtctgg

SEQ ID NO: 271 - DNA, 23 bp, Artificial Sequence
  sgRNA
acggccggagttggtggtctggg

SEQ ID NO: 272 - DNA, 23 bp, Artificial Sequence
  sgRNA
tggtggtctgggaacccacgtgg

SEQ ID NO: 273 - DNA, 23 bp, Artificial Sequence
  sgRNA
ggtggtctgggaacccacgtggg

SEQ ID NO: 274 - DNA, 23 bp, Artificial Sequence
  sgRNA
gtctgggaacccacgtgggctgg

SEQ ID NO: 275 - DNA, 23 bp, Artificial Sequence
  sgRNA
tctgggaacccacgtgggctggg

SEQ ID NO: 276 - DNA, 23 bp, Artificial Sequence
  sgRNA
aacccacgtgggctgggtttcgg

SEQ ID NO: 277 - DNA, 23 bp, Artificial Sequence
  sgRNA
tgggtttcggattgctctgctgg

SEQ ID NO: 278 - DNA, 23 bp, Artificial Sequence
  sgRNA
ttcggattgctctgctggtccgg

SEQ ID NO: 279 - DNA, 23 bp, Artificial Sequence
  sgRNA
tgctctgctggtccggccgctgg

SEQ ID NO: 280 - DNA, 23 bp, Artificial Sequence
  sgRNA
ggccgctggagcgcccaccctgg

SEQ ID NO: 281 - DNA, 23 bp, Artificial Sequence
  sgRNA
ccaccctggcctagtcgccatgg

SEQ ID NO: 282 - DNA, 23 bp, Artificial Sequence
  sgRNA
caccctggcctagtcgccatggg

SEQ ID NO: 283 - DNA, 23 bp, Artificial Sequence
  sgRNA
accctggcctagtcgccatgggg

SEQ ID NO: 284 - DNA, 23 bp, Artificial Sequence
  sgRNA
tcgccatggggaagctgcgccgg

SEQ ID NO: 285 - DNA, 23 bp, Artificial Sequence
  sgRNA
gcgccggcgctacaacatcaagg

SEQ ID NO: 286 - DNA, 23 bp, Artificial Sequence
  sgRNA
cgccggcgctacaacatcaaggg

SEQ ID NO: 287 - DNA, 23 bp, Artificial Sequence
  sgRNA
gccggcgctacaacatcaagggg

SEQ ID NO: 288 - DNA, 23 bp, Artificial Sequence
  sgRNA
caacatcaaggggcgccagcagg

SEQ ID NO: 289 - DNA, 23 bp, Artificial Sequence
  sgRNA
catcaaggggcgccagcaggcgg

SEQ ID NO: 290 - DNA, 23 bp, Artificial Sequence
  sgRNA
atcaaggggcgccagcaggcggg

SEQ ID NO: 291 - DNA, 23 bp, Artificial Sequence
  sgRNA
gggcgccagcaggcgggccccgg

SEQ ID NO: 292 - DNA, 23 bp, Artificial Sequence
  sgRNA
ggcgggccccggaccctcgaagg

SEQ ID NO: 293 - DNA, 23 bp, Artificial Sequence
  sgRNA
gcgggccccggaccctcgaaggg

SEQ ID NO: 294 - DNA, 23 bp, Artificial Sequence
  sgRNA
cgagccgccccccgtgcagctgg

SEQ ID NO: 295 - DNA, 23 bp, Artificial Sequence
  sgRNA
gccccccgtgcagctggaactgg

SEQ ID NO: 296 - DNA, 23 bp, Artificial Sequence
  sgRNA
ccccgtgcagctggaactggagg

SEQ ID NO: 297 - DNA, 23 bp, Artificial Sequence
  sgRNA
ctgtattcatctgcggtttttgg

SEQ ID NO: 298 - DNA, 23 bp, Artificial Sequence
  sgRNA
ttcctcctccagaaatcacccgg

SEQ ID NO: 299 - DNA, 23 bp, Artificial Sequence
  sgRNA
ctcctccagaaatcacccggagg

SEQ ID NO: 300 - DNA, 23 bp, Artificial Sequence
  sgRNA
agacttaatccttcaaatgaagg

SEQ ID NO: 301 - DNA, 23 bp, Artificial Sequence
  sgRNA
ccagtgacgaggagctcaccagg

SEQ ID NO: 302 - DNA, 23 bp, Artificial Sequence
  sgRNA
tcaccaggctgaagagcaagcgg

SEQ ID NO: 303 - DNA, 23 bp, Artificial Sequence
  sgRNA
caccaggctgaagagcaagcggg

SEQ ID NO: 304 - DNA, 23 bp, Artificial Sequence
  sgRNA
ggctgaagagcaagcgggcccgg

SEQ ID NO: 305 - DNA, 23 bp, Artificial Sequence
  sgRNA
gctgaagagcaagcgggcccggg

SEQ ID NO: 306 - DNA, 23 bp, Artificial Sequence
  sgRNA
gaagagcaagcgggcccgggtgg

SEQ ID NO: 307 - DNA, 23 bp, Artificial Sequence
  sgRNA
cccgggtggcccagatgaagagg

SEQ ID NO: 308 - DNA, 23 bp, Artificial Sequence
  sgRNA
tggcccagatgaagaggacctgg

SEQ ID NO: 309 - DNA, 23 bp, Artificial Sequence
  sgRNA
ggcccagatgaagaggacctggg

SEQ ID NO: 310 - DNA, 23 bp, Artificial Sequence
  sgRNA
cagatgaagaggacctgggcagg

SEQ ID NO: 311 - DNA, 23 bp, Artificial Sequence
  sgRNA
agatgaagaggacctgggcaggg

SEQ ID NO: 312 - DNA, 23 bp, Artificial Sequence
  sgRNA
gaagaggacctgggcagggcagg

SEQ ID NO: 313 - DNA, 23 bp, Artificial Sequence
  sgRNA
aagaggacctgggcagggcaggg

SEQ ID NO: 314 - DNA, 23 bp, Artificial Sequence
  sgRNA
agaggacctgggcagggcagggg

SEQ ID NO: 315 - DNA, 23 bp, Artificial Sequence
  sgRNA
gaggacctgggcagggcaggggg

SEQ ID NO: 316 - DNA, 23 bp, Artificial Sequence
  sgRNA
cagggggcttctctgaagctcgg

SEQ ID NO: 317 - DNA, 23 bp, Artificial Sequence
  sgRNA
tctgaagctcggcgacctcatgg

SEQ ID NO: 318 - DNA, 23 bp, Artificial Sequence
  sgRNA
cggcgacctcatggtgctgctgg

SEQ ID NO: 319 - DNA, 23 bp, Artificial Sequence
  sgRNA
tgaagcaactgcaggagaaccgg

SEQ ID NO: 320 - DNA, 23 bp, Artificial Sequence
  sgRNA
gagctgccccatcactgcgctgg

SEQ ID NO: 321 - DNA, 23 bp, Artificial Sequence
  sgRNA
agctgccccatcactgcgctggg

SEQ ID NO: 322 - DNA, 23 bp, Artificial Sequence
  sgRNA
gccccatcactgcgctgggccgg

SEQ ID NO: 323 - DNA, 23 bp, Artificial Sequence
  sgRNA
cactgcgctgggccggacaatgg

SEQ ID NO: 324 - DNA, 23 bp, Artificial Sequence
  sgRNA
gacaatggccacattccccgtgg

SEQ ID NO: 325 - DNA, 23 bp, Artificial Sequence
  sgRNA
accccgctacgctaagatgctgg

SEQ ID NO: 326 - DNA, 23 bp, Artificial Sequence
  sgRNA
ctggcactgagccgacaacacgg

SEQ ID NO: 327 - DNA, 23 bp, Artificial Sequence
  sgRNA
gccctatgccatcaccatcgtgg

SEQ ID NO: 328 - DNA, 23 bp, Artificial Sequence
  sgRNA
caccatcgtggccagcatgacgg

SEQ ID NO: 329 - DNA, 23 bp, Artificial Sequence
  sgRNA
tcgtggccagcatgacggtgcgg

SEQ ID NO: 330 - DNA, 23 bp, Artificial Sequence
  sgRNA
cgtggccagcatgacggtgcggg

SEQ ID NO: 331 - DNA, 23 bp, Artificial Sequence
  sgRNA
gacggtgcgggagctgtttgagg

SEQ ID NO: 332 - DNA, 23 bp, Artificial Sequence
  sgRNA
gcgggagctgtttgaggagctgg

SEQ ID NO: 333 - DNA, 23 bp, Artificial Sequence
  sgRNA
ctggccgctccccgccatcgagg

SEQ ID NO: 334 - DNA, 23 bp, Artificial Sequence
  sgRNA
gccgctccccgccatcgaggtgg

SEQ ID NO: 335 - DNA, 23 bp, Artificial Sequence
  sgRNA
catcgaggtggattttccagagg

SEQ ID NO: 336 - DNA, 23 bp, Artificial Sequence
  sgRNA
atcgaggtggattttccagaggg

SEQ ID NO: 337 - DNA, 23 bp, Artificial Sequence
  sgRNA
tcgaggtggattttccagagggg

SEQ ID NO: 338 - DNA, 23 bp, Artificial Sequence
  sgRNA
accgctacaagcactttgcccgg

SEQ ID NO: 339 - DNA, 23 bp, Artificial Sequence
  sgRNA
gcactttgcccggttcctgctgg

SEQ ID NO: 340 - DNA, 23 bp, Artificial Sequence
  sgRNA
tttgcccggttcctgctggaagg

SEQ ID NO: 341 - DNA, 23 bp, Artificial Sequence
  sgRNA
ttgcccggttcctgctggaaggg

SEQ ID NO: 342 - DNA, 23 bp, Artificial Sequence
  sgRNA
gatcaacttggatcattactcgg

SEQ ID NO: 343 - DNA, 23 bp, Artificial Sequence
  sgRNA
ggatcattactcggtgttaccgg

SEQ ID NO: 344 - DNA, 23 bp, Artificial Sequence
  sgRNA
cattactcggtgttaccggcagg

SEQ ID NO: 345 - DNA, 23 bp, Artificial Sequence
  sgRNA
tcggtgttaccggcaggcgaagg

SEQ ID NO: 346 - DNA, 23 bp, Artificial Sequence
  sgRNA
accggcaggcgaaggcgatgagg

SEQ ID NO: 347 - DNA, 23 bp, Artificial Sequence
  sgRNA
caggcgaaggcgatgaggacagg

SEQ ID NO: 348 - DNA, 23 bp, Artificial Sequence
  sgRNA
aggcgaaggcgatgaggacaggg

SEQ ID NO: 349 - DNA, 23 bp, Artificial Sequence
  sgRNA
cgaaggcgatgaggacagggagg

SEQ ID NO: 350 - DNA, 23 bp, Artificial Sequence
  sgRNA
tgaggacagggaggcagaagtgg

SEQ ID NO: 351 - DNA, 23 bp, Artificial Sequence
  sgRNA
cagggaggcagaagtggatgagg

SEQ ID NO: 352 - DNA, 23 bp, Artificial Sequence
  sgRNA
ggcagaagtggatgaggaagagg

SEQ ID NO: 353 - DNA, 23 bp, Artificial Sequence
  sgRNA
gcagaagtggatgaggaagaggg

SEQ ID NO: 354 - DNA, 23 bp, Artificial Sequence
  sgRNA
cagaagtggatgaggaagagggg

SEQ ID NO: 355 - DNA, 23 bp, Artificial Sequence
  sgRNA
agaagtggatgaggaagaggggg

SEQ ID NO: 356 - DNA, 23 bp, Artificial Sequence
  sgRNA
ggatgaggaagagggggccctgg

SEQ ID NO: 357 - DNA, 23 bp, Artificial Sequence
  sgRNA
cctggactccgacctcgatctgg

SEQ ID NO: 358 - DNA, 23 bp, Artificial Sequence
  sgRNA
ctccgacctcgatctggacctgg

SEQ ID NO: 359 - DNA, 23 bp, Artificial Sequence
  sgRNA
tccgacctcgatctggacctggg

SEQ ID NO: 360 - DNA, 23 bp, Artificial Sequence
  sgRNA
ccgacctcgatctggacctgggg

SEQ ID NO: 361 - DNA, 23 bp, Artificial Sequence
  sgRNA
cgacctcgatctggacctggggg

SEQ ID NO: 362 - DNA, 23 bp, Artificial Sequence
  sgRNA
ctcgatctggacctgggggatgg

SEQ ID NO: 363 - DNA, 23 bp, Artificial Sequence
  sgRNA
gatctggacctgggggatggcgg

SEQ ID NO: 364 - DNA, 23 bp, Artificial Sequence
  sgRNA
atctggacctgggggatggcggg

SEQ ID NO: 365 - DNA, 23 bp, Artificial Sequence
  sgRNA
ctgggggatggcgggcaagatgg

SEQ ID NO: 366 - DNA, 23 bp, Artificial Sequence
  sgRNA
cttcccgacgcccccctccgtgg

SEQ ID NO: 367 - DNA, 23 bp, Artificial Sequence
  sgRNA
ggaagcccttcttgccgccgagg

SEQ ID NO: 368 - DNA, 23 bp, Artificial Sequence
  sgRNA
cgaggagctgttgatcgcactgg

SEQ ID NO: 369 - DNA, 23 bp, Artificial Sequence
  sgRNA
gaggagctgttgatcgcactggg

SEQ ID NO: 370 - DNA, 23 bp, Artificial Sequence
  sgRNA
tgactgtgcatttcaacaagcgg

SEQ ID NO: 371 - DNA, 23 bp, Artificial Sequence
  sgRNA
tttcaacaagcggacaccgctgg

SEQ ID NO: 372 - DNA, 23 bp, Artificial Sequence
  sgRNA
acaccgctggaagactacagtgg

SEQ ID NO: 373 - DNA, 23 bp, Artificial Sequence
  sgRNA
actacagtggcgagtgcttccgg

SEQ ID NO: 374 - DNA, 23 bp, Artificial Sequence
  sgRNA
cagtggcgagtgcttccggaagg

SEQ ID NO: 375 - DNA, 23 bp, Artificial Sequence
  sgRNA
ggaaggtctgcaagatccaccgg

SEQ ID NO: 376 - DNA, 23 bp, Artificial Sequence
  sgRNA
tccgcaagctggcctcataccgg

SEQ ID NO: 377 - DNA, 23 bp, Artificial Sequence
  sgRNA
agctgtctgctgtccagccccgg

SEQ ID NO: 378 - DNA, 23 bp, Artificial Sequence
  sgRNA
ccggcaccatgctgaagacgtgg

SEQ ID NO: 379 - DNA, 23 bp, Artificial Sequence
  sgRNA
cggcaccatgctgaagacgtggg

SEQ ID NO: 380 - DNA, 23 bp, Artificial Sequence
  sgRNA
aagcaacgcgctcgttctaccgg

SEQ ID NO: 381 - DNA, 23 bp, Artificial Sequence
  sgRNA
agcaacgcgctcgttctaccggg

SEQ ID NO: 382 - DNA, 23 bp, Artificial Sequence
  sgRNA
gcaacgcgctcgttctaccgggg

SEQ ID NO: 383 - DNA, 23 bp, Artificial Sequence
  sgRNA
agcccctcccctgtcgaagaagg

SEQ ID NO: 384 - DNA, 23 bp, Artificial Sequence
  sgRNA
gaagaagcctctgaccaagaagg

SEQ ID NO: 385 - DNA, 23 bp, Artificial Sequence
  sgRNA
gcagaaaatcttagaacagaagg

SEQ ID NO: 386 - DNA, 23 bp, Artificial Sequence
  sgRNA
ccccgaggctgagctcttcgtgg

SEQ ID NO: 387 - DNA, 23 bp, Artificial Sequence
  sgRNA
gcagccgcccaccgagagccagg

SEQ ID NO: 388 - DNA, 23 bp, Artificial Sequence
  sgRNA
ctacctgcgacagatcgtgacgg

SEQ ID NO: 389 - DNA, 23 bp, Artificial Sequence
  sgRNA
ctgcgacagatcgtgacggcagg

SEQ ID NO: 390 - DNA, 23 bp, Artificial Sequence
  sgRNA
acagatcgtgacggcaggcctgg

SEQ ID NO: 391 - DNA, 23 bp, Artificial Sequence
  sgRNA
cagatcgtgacggcaggcctggg

SEQ ID NO: 392 - DNA, 23 bp, Artificial Sequence
  sgRNA
agatcgtgacggcaggcctgggg

SEQ ID NO: 393 - DNA, 23 bp, Artificial Sequence
  sgRNA
gatcgtgacggcaggcctggggg

SEQ ID NO: 394 - DNA, 23 bp, Artificial Sequence
  sgRNA
ggcaggcctgggggaccacttgg

SEQ ID NO: 395 - DNA, 23 bp, Artificial Sequence
  sgRNA
tgggggaccacttggcccgcagg

SEQ ID NO: 396 - DNA, 23 bp, Artificial Sequence
  sgRNA
gggggaccacttggcccgcaggg

SEQ ID NO: 397 - DNA, 23 bp, Artificial Sequence
  sgRNA
ggcccgcagggtccagagcgagg

SEQ ID NO: 398 - DNA, 23 bp, Artificial Sequence
  sgRNA
ggtccagagcgaggagatgctgg

SEQ ID NO: 399 - DNA, 23 bp, Artificial Sequence
  sgRNA
ccagagcgaggagatgctggagg

SEQ ID NO: 400 - DNA, 23 bp, Artificial Sequence
  sgRNA
aggagatgctggaggacaagtgg

SEQ ID NO: 401 - DNA, 23 bp, Artificial Sequence
  sgRNA
agatgctggaggacaagtggagg

SEQ ID NO: 402 - DNA, 23 bp, Artificial Sequence
  sgRNA
caaagagctccccgagtttgtgg

SEQ ID NO: 403 - DNA, 23 bp, Artificial Sequence
  sgRNA
ccccgagtttgtggtctaccagg

SEQ ID NO: 404 - DNA, 23 bp, Artificial Sequence
  sgRNA
tgtggtctaccaggaaatcgtgg

SEQ ID NO: 405 - DNA, 23 bp, Artificial Sequence
  sgRNA
gaagccgcagaagcaaagccagg

SEQ ID NO: 406 - DNA, 23 bp, Artificial Sequence
  sgRNA
agaatccattctgccagcgctgg

SEQ ID NO: 407 - DNA, 23 bp, Artificial Sequence
  sgRNA
gaatccattctgccagcgctggg

SEQ ID NO: 408 - DNA, 23 bp, Artificial Sequence
  sgRNA
attctgccagcgctgggctctgg

SEQ ID NO: 409 - DNA, 23 bp, Artificial Sequence
  sgRNA
ttctgccagcgctgggctctggg

SEQ ID NO: 410 - DNA, 23 bp, Artificial Sequence
  sgRNA
tctgccagcgctgggctctgggg

SEQ ID NO: 411 - DNA, 23 bp, Artificial Sequence
  sgRNA
agacatctgtgccctcaccatgg

SEQ ID NO: 412 - DNA, 23 bp, Artificial Sequence
  sgRNA
catctgtgccctcaccatggagg

SEQ ID NO: 413 - DNA, 23 bp, Artificial Sequence
  sgRNA
ccctcaccatggaggacagaagg

SEQ ID NO: 414 - DNA, 23 bp, Artificial Sequence
  sgRNA
caccatggaggacagaaggcagg

SEQ ID NO: 415 - DNA, 23 bp, Artificial Sequence
  sgRNA
accatggaggacagaaggcaggg

SEQ ID NO: 416 - DNA, 23 bp, Artificial Sequence
  sgRNA
ccatggaggacagaaggcagggg

SEQ ID NO: 417 - DNA, 23 bp, Artificial Sequence
  sgRNA
gcaggggcctcccgactccttgg

SEQ ID NO: 418 - DNA, 23 bp, Artificial Sequence
  sgRNA
cccgactccttggtcctgcctgg

SEQ ID NO: 419 - DNA, 23 bp, Artificial Sequence
  sgRNA
ccgactccttggtcctgcctggg

SEQ ID NO: 420 - DNA, 23 bp, Artificial Sequence
  sgRNA
cgactccttggtcctgcctgggg

SEQ ID NO: 421 - DNA, 23 bp, Artificial Sequence
  sgRNA
ctcctgtccctctttcttgctgg

SEQ ID NO: 422 - DNA, 23 bp, Artificial Sequence
  sgRNA
tcctgtccctctttcttgctggg

SEQ ID NO: 423 - DNA, 23 bp, Artificial Sequence
  sgRNA
cctgtccctctttcttgctgggg

SEQ ID NO: 424 - DNA, 23 bp, Artificial Sequence
  sgRNA
ctgtccctctttcttgctggggg

SEQ ID NO: 425 - DNA, 23 bp, Artificial Sequence
  sgRNA
ccctcccacctcagccacagagg

SEQ ID NO: 426 - DNA, 23 bp, Artificial Sequence
  sgRNA
acctcagccacagaggaacaagg

SEQ ID NO: 427 - DNA, 23 bp, Artificial Sequence
  sgRNA
cctcagccacagaggaacaaggg

SEQ ID NO: 428 - DNA, 23 bp, Artificial Sequence
  sgRNA
ggaacaagggagacaaactgagg

SEQ ID NO: 429 - DNA, 23 bp, Artificial Sequence
  sgRNA
gaacaagggagacaaactgaggg

SEQ ID NO: 430 - DNA, 23 bp, Artificial Sequence
  sgRNA
ggctctgcagtccccgttcaagg

SEQ ID NO: 431 - DNA, 23 bp, Artificial Sequence
  sgRNA
aggccaacataatagtcgtgtgg

SEQ ID NO: 432 - DNA, 23 bp, Artificial Sequence
  sgRNA
cgtgtggccccagcccagctagg

SEQ ID NO: 433 - DNA, 23 bp, Artificial Sequence
  sgRNA
ccagctaggcgcatcctctgcgg

SEQ ID NO: 434 - DNA, 23 bp, Artificial Sequence
  sgRNA
taggcgcatcctctgcggcatgg

SEQ ID NO: 435 - DNA, 23 bp, Artificial Sequence
  sgRNA
catcctctgcggcatggcagcgg

SEQ ID NO: 436 - DNA, 23 bp, Artificial Sequence
  sgRNA
gccgtctgagagctgaccacagg

SEQ ID NO: 437 - DNA, 23 bp, Artificial Sequence
  sgRNA
actccctgttgccataacacagg

SEQ ID NO: 438 - DNA, 23 bp, Artificial Sequence
  sgRNA
ctgttgccataacacaggaaagg

SEQ ID NO: 439 - DNA, 23 bp, Artificial Sequence
  sgRNA
ccataacacaggaaaggcgttgg

SEQ ID NO: 440 - DNA, 23 bp, Artificial Sequence
  sgRNA
taacacaggaaaggcgttggcgg

SEQ ID NO: 441 - DNA, 23 bp, Artificial Sequence
  sgRNA
tggcggccaccctcccaagaagg

SEQ ID NO: 442 - DNA, 23 bp, Artificial Sequence
  sgRNA
gccaccctcccaagaaggcatgg

SEQ ID NO: 443 - DNA, 23 bp, Artificial Sequence
  sgRNA
tcccaagaaggcatggagcctgg

SEQ ID NO: 444 - DNA, 23 bp, Artificial Sequence
  sgRNA
cccaagaaggcatggagcctggg

SEQ ID NO: 445 - DNA, 23 bp, Artificial Sequence
  sgRNA
ccaagaaggcatggagcctgggg

SEQ ID NO: 446 - DNA, 23 bp, Artificial Sequence
  sgRNA
caagaaggcatggagcctggggg

SEQ ID NO: 447 - DNA, 23 bp, Artificial Sequence
  sgRNA
gagcctgggggcccccagccagg

SEQ ID NO: 448 - DNA, 23 bp, Artificial Sequence
  sgRNA
gcccccagccaggcccctcaagg

SEQ ID NO: 449 - DNA, 23 bp, Artificial Sequence
  sgRNA
aaggtcaacacagagctcagtgg

SEQ ID NO: 450 - DNA, 23 bp, Artificial Sequence
  sgRNA
tcagtggctcacctaacatctgg

SEQ ID NO: 451 - DNA, 23 bp, Artificial Sequence
  sgRNA
cagtggctcacctaacatctggg

SEQ ID NO: 452 - DNA, 23 bp, Artificial Sequence
  sgRNA
ggctcacctaacatctgggacgg

SEQ ID NO: 453 - DNA, 23 bp, Artificial Sequence
  sgRNA
taacatctgggacggctgtgagg

SEQ ID NO: 454 - DNA, 23 bp, Artificial Sequence
  sgRNA
tctgggacggctgtgaggccagg

SEQ ID NO: 455 - DNA, 23 bp, Artificial Sequence
  sgRNA
ctgggacggctgtgaggccaggg

SEQ ID NO: 456 - DNA, 23 bp, Artificial Sequence
  sgRNA
gacggctgtgaggccagggctgg

SEQ ID NO: 457 - DNA, 23 bp, Artificial Sequence
  sgRNA
acggctgtgaggccagggctggg

SEQ ID NO: 458 - DNA, 23 bp, Artificial Sequence
  sgRNA
tgggcagccctccctgactctgg

SEQ ID NO: 459 - DNA, 23 bp, Artificial Sequence
  sgRNA
agccctccctgactctggagagg

SEQ ID NO: 460 - DNA, 23 bp, Artificial Sequence
  sgRNA
gccctccctgactctggagaggg

SEQ ID NO: 461 - DNA, 23 bp, Artificial Sequence
  sgRNA
tctggagagggaagaattgcagg

SEQ ID NO: 462 - DNA, 23 bp, Artificial Sequence
  sgRNA
gagagggaagaattgcaggaagg

SEQ ID NO: 463 - DNA, 23 bp, Artificial Sequence
  sgRNA
agggaagaattgcaggaaggagg

SEQ ID NO: 464 - DNA, 23 bp, Artificial Sequence
  sgRNA
aggccctccacgtgcctcctcgg

SEQ ID NO: 465 - DNA, 23 bp, Artificial Sequence
  sgRNA
cacgtgcctcctcggccttctgg

SEQ ID NO: 466 - DNA, 23 bp, Artificial Sequence
  sgRNA
tgcctcctcggccttctggcagg

SEQ ID NO: 467 - DNA, 23 bp, Artificial Sequence
  sgRNA
gcctcctcggccttctggcaggg

SEQ ID NO: 468 - DNA, 23 bp, Artificial Sequence
  sgRNA
tcctcggccttctggcagggcgg

SEQ ID NO: 469 - DNA, 23 bp, Artificial Sequence
  sgRNA
cctcggccttctggcagggcggg

SEQ ID NO: 470 - DNA, 23 bp, Artificial Sequence
  sgRNA
cggccttctggcagggcgggcgg

SEQ ID NO: 471 - DNA, 23 bp, Artificial Sequence
  sgRNA
ggccttctggcagggcgggcggg

SEQ ID NO: 472 - DNA, 23 bp, Artificial Sequence
  sgRNA
gccttctggcagggcgggcgggg

SEQ ID NO: 473 - DNA, 23 bp, Artificial Sequence
  sgRNA
tctggcagggcgggcggggaagg

SEQ ID NO: 474 - DNA, 23 bp, Artificial Sequence
  sgRNA
ctggcagggcgggcggggaaggg

SEQ ID NO: 475 - DNA, 23 bp, Artificial Sequence
  sgRNA
ctccagccctgctgctccacagg

SEQ ID NO: 476 - DNA, 23 bp, Artificial Sequence
  sgRNA
tccagccctgctgctccacaggg

SEQ ID NO: 477 - DNA, 23 bp, Artificial Sequence
  sgRNA
ccagccctgctgctccacagggg

SEQ ID NO: 478 - DNA, 23 bp, Artificial Sequence
  sgRNA
acagttcaaaaagtcacccccgg

SEQ ID NO: 479 - DNA, 23 bp, Artificial Sequence
  sgRNA
cagttcaaaaagtcacccccggg

SEQ ID NO: 480 - DNA, 23 bp, Artificial Sequence
  sgRNA
aaagtcacccccgggccagatgg

SEQ ID NO: 481 - DNA, 23 bp, Artificial Sequence
  sgRNA
cacccccgggccagatggcacgg

SEQ ID NO: 482 - DNA, 23 bp, Artificial Sequence
  sgRNA
acccccgggccagatggcacggg

SEQ ID NO: 483 - DNA, 23 bp, Artificial Sequence
  sgRNA
cccgggccagatggcacgggcgg

SEQ ID NO: 484 - DNA, 23 bp, Artificial Sequence
  sgRNA
gggcggcagcacccttcatacgg

SEQ ID NO: 485 - DNA, 23 bp, Artificial Sequence
  sgRNA
ggcggcagcacccttcatacggg

SEQ ID NO: 486 - DNA, 23 bp, Artificial Sequence
  sgRNA
catacgggatcgagctctcatgg

SEQ ID NO: 487 - DNA, 23 bp, Artificial Sequence
  sgRNA
ggatcgagctctcatggatgagg

SEQ ID NO: 488 - DNA, 23 bp, Artificial Sequence
  sgRNA
gatcgagctctcatggatgaggg

SEQ ID NO: 489 - DNA, 23 bp, Artificial Sequence
  sgRNA
tctcatggatgagggttcccagg

SEQ ID NO: 490 - DNA, 23 bp, Artificial Sequence
  sgRNA
ctcatggatgagggttcccaggg

SEQ ID NO: 491 - DNA, 23 bp, Artificial Sequence
  sgRNA
ttgacccacttcctgagagcagg

SEQ ID NO: 492 - DNA, 23 bp, Artificial Sequence
  sgRNA
caggccacgaagcccatgccagg

SEQ ID NO: 493 - DNA, 23 bp, Artificial Sequence
  sgRNA
gccacgaagcccatgccaggtgg

SEQ ID NO: 494 - DNA, 23 bp, Artificial Sequence
  sgRNA
aagcccatgccaggtggtcacgg

SEQ ID NO: 495 - DNA, 23 bp, Artificial Sequence
  sgRNA
gccaggtggtcacggtcgcacgg

SEQ ID NO: 496 - DNA, 23 bp, Artificial Sequence
  sgRNA
ggtcacggtcgcacggtgacagg

SEQ ID NO: 497 - DNA, 23 bp, Artificial Sequence
  sgRNA
ccagtccccaaaccagtcctcgg

SEQ ID NO: 498 - DNA, 23 bp, Artificial Sequence
  sgRNA
cagtcctcggccctgcagccagg

SEQ ID NO: 499 - DNA, 23 bp, Artificial Sequence
  sgRNA
cggccctgcagccaggtttctgg

SEQ ID NO: 500 - DNA, 23 bp, Artificial Sequence
  sgRNA
gcagccaggtttctggtcagtgg

SEQ ID NO: 501 - DNA, 23 bp, Artificial Sequence
  sgRNA
ggtttctggtcagtggacagtgg

SEQ ID NO: 502 - DNA, 23 bp, Artificial Sequence
  sgRNA
ttctggtcagtggacagtggtgg

SEQ ID NO: 503 - DNA, 23 bp, Artificial Sequence
  sgRNA
tctggtcagtggacagtggtggg

SEQ ID NO: 504 - DNA, 23 bp, Artificial Sequence
  sgRNA
ctggtcagtggacagtggtgggg

SEQ ID NO: 505 - DNA, 23 bp, Artificial Sequence
  sgRNA
tggtcagtggacagtggtggggg

SEQ ID NO: 506 - DNA, 23 bp, Artificial Sequence
  sgRNA
ggtcagtggacagtggtgggggg

SEQ ID NO: 507 - DNA, 23 bp, Artificial Sequence
  sgRNA
gtggacagtggtggggggccagg

SEQ ID NO: 508 - DNA, 23 bp, Artificial Sequence
  sgRNA
gggccaggctttctcgatatcgg

SEQ ID NO: 509 - DNA, 23 bp, Artificial Sequence
  sgRNA
ggccaggctttctcgatatcggg

SEQ ID NO: 510 - DNA, 23 bp, Artificial Sequence
  sgRNA
gccaggctttctcgatatcgggg

SEQ ID NO: 511 - DNA, 23 bp, Artificial Sequence
  sgRNA
tttctcgatatcggggtgcatgg

SEQ ID NO: 512 - DNA, 23 bp, Artificial Sequence
  sgRNA
atatcggggtgcatggcctgtgg

SEQ ID NO: 513 - DNA, 23 bp, Artificial Sequence
  sgRNA
actcacagtactcagccagcagg

SEQ ID NO: 514 - DNA, 23 bp, Artificial Sequence
  sgRNA
ctgggacagattcatctccttgg

SEQ ID NO: 515 - DNA, 23 bp, Artificial Sequence
  sgRNA
tcatctccttggccactcgctgg

SEQ ID NO: 516 - DNA, 23 bp, Artificial Sequence
  sgRNA
catctccttggccactcgctggg

SEQ ID NO: 517 - DNA, 23 bp, Artificial Sequence
  sgRNA
cttggccactcgctgggacatgg

SEQ ID NO: 518 - DNA, 23 bp, Artificial Sequence
  sgRNA
cactcgctgggacatggccacgg

SEQ ID NO: 519 - DNA, 23 bp, Artificial Sequence
  sgRNA
tcgctgggacatggccacggcgg

SEQ ID NO: 520 - DNA, 23 bp, Artificial Sequence
  sgRNA
acatggccacggcggccactcgg

SEQ ID NO: 521 - DNA, 23 bp, Artificial Sequence
  sgRNA
tggccacggcggccactcggcgg

SEQ ID NO: 522 - DNA, 23 bp, Artificial Sequence
  sgRNA
ggccacggcggccactcggcggg

SEQ ID NO: 523 - DNA, 23 bp, Artificial Sequence
  sgRNA
gccacggcggccactcggcgggg

SEQ ID NO: 524 - DNA, 23 bp, Artificial Sequence
  sgRNA
tagcccggagagtcacaatgcgg

SEQ ID NO: 525 - DNA, 23 bp, Artificial Sequence
  sgRNA
agcccggagagtcacaatgcggg

SEQ ID NO: 526 - DNA, 23 bp, Artificial Sequence
  sgRNA
ggagagtcacaatgcgggacagg

SEQ ID NO: 527 - DNA, 23 bp, Artificial Sequence
  sgRNA
gagtcacaatgcgggacaggagg

SEQ ID NO: 528 - DNA, 23 bp, Artificial Sequence
  sgRNA
tgcgggacaggaggccgatgagg

SEQ ID NO: 529 - DNA, 23 bp, Artificial Sequence
  sgRNA
ccgtgtacacgctcctctcgtgg

SEQ ID NO: 530 - DNA, 23 bp, Artificial Sequence
  sgRNA
cgtgtacacgctcctctcgtggg

SEQ ID NO: 531 - DNA, 23 bp, Artificial Sequence
  sgRNA
ccaccttgtaccgcagcagcagg

SEQ ID NO: 532 - DNA, 23 bp, Artificial Sequence
  sgRNA
catttccggggagcggttcacgg

SEQ ID NO: 533 - DNA, 23 bp, Artificial Sequence
  sgRNA
atttccggggagcggttcacggg

SEQ ID NO: 534 - DNA, 23 bp, Artificial Sequence
  sgRNA
tttccggggagcggttcacgggg

SEQ ID NO: 535 - DNA, 23 bp, Artificial Sequence
  sgRNA
gcggttcacggggatgaagacgg

SEQ ID NO: 536 - DNA, 23 bp, Artificial Sequence
  sgRNA
gttcacggggatgaagacggcgg

SEQ ID NO: 537 - DNA, 23 bp, Artificial Sequence
  sgRNA
ttcacggggatgaagacggcggg

SEQ ID NO: 538 - DNA, 23 bp, Artificial Sequence
  sgRNA
tgaagacggcgggcttagccagg

SEQ ID NO: 539 - DNA, 23 bp, Artificial Sequence
  sgRNA
gaagacggcgggcttagccaggg

SEQ ID NO: 540 - DNA, 23 bp, Artificial Sequence
  sgRNA
ggcgggcttagccagggccctgg

SEQ ID NO: 541 - DNA, 23 bp, Artificial Sequence
  sgRNA
gcgggcttagccagggccctggg

SEQ ID NO: 542 - DNA, 23 bp, Artificial Sequence
  sgRNA
ttagccagggccctgggcagtgg

SEQ ID NO: 543 - DNA, 23 bp, Artificial Sequence
  sgRNA
gccagggccctgggcagtggtgg

SEQ ID NO: 544 - DNA, 23 bp, Artificial Sequence
  sgRNA
ccagggccctgggcagtggtggg

SEQ ID NO: 545 - DNA, 23 bp, Artificial Sequence
  sgRNA
cagggccctgggcagtggtgggg

SEQ ID NO: 546 - DNA, 23 bp, Artificial Sequence
  sgRNA
ggcagtggtggggctgcagctgg

SEQ ID NO: 547 - DNA, 23 bp, Artificial Sequence
  sgRNA
agtggtggggctgcagctggagg

SEQ ID NO: 548 - DNA, 23 bp, Artificial Sequence
  sgRNA
ggtggggctgcagctggaggagg

SEQ ID NO: 549 - DNA, 23 bp, Artificial Sequence
  sgRNA
ggggctgcagctggaggaggagg

SEQ ID NO: 550 - DNA, 23 bp, Artificial Sequence
  sgRNA
ggaggaacagtcatcccagccgg

SEQ ID NO: 551 - DNA, 23 bp, Artificial Sequence
  sgRNA
aacagtcatcccagccggcacgg

SEQ ID NO: 552 - DNA, 23 bp, Artificial Sequence
  sgRNA
acagtcatcccagccggcacggg

SEQ ID NO: 553 - DNA, 23 bp, Artificial Sequence
  sgRNA
agccggcacgggctgactgctgg

SEQ ID NO: 554 - DNA, 23 bp, Artificial Sequence
  sgRNA
gccggcacgggctgactgctggg

SEQ ID NO: 555 - DNA, 23 bp, Artificial Sequence
  sgRNA
acgggctgactgctgggtgctgg

SEQ ID NO: 556 - DNA, 23 bp, Artificial Sequence
  sgRNA
tgactgctgggtgctggagctgg

SEQ ID NO: 557 - DNA, 23 bp, Artificial Sequence
  sgRNA
ctgctgggtgctggagctggcgg

SEQ ID NO: 558 - DNA, 23 bp, Artificial Sequence
  sgRNA
ggtgctggagctggcggcagagg

SEQ ID NO: 559 - DNA, 23 bp, Artificial Sequence
  sgRNA
agctggcggcagaggtgccacgg

SEQ ID NO: 560 - DNA, 23 bp, Artificial Sequence
  sgRNA
tggcggcagaggtgccacggtgg

SEQ ID NO: 561 - DNA, 23 bp, Artificial Sequence
  sgRNA
gtccccacaccagcctcagccgg

SEQ ID NO: 562 - DNA, 23 bp, Artificial Sequence
  sgRNA
gcctcagccggctcagcagctgg

SEQ ID NO: 563 - DNA, 23 bp, Artificial Sequence
  sgRNA
cctcagccggctcagcagctggg

SEQ ID NO: 564 - DNA, 23 bp, Artificial Sequence
  sgRNA
ctcctcctcctcctcagctgagg

SEQ ID NO: 565 - DNA, 23 bp, Artificial Sequence
  sgRNA
tcctcctcctcctcagctgaggg

SEQ ID NO: 566 - DNA, 23 bp, Artificial Sequence
  sgRNA
cctcctcagctgagggccagcgg

SEQ ID NO: 567 - DNA, 23 bp, Artificial Sequence
  sgRNA
agggccagcggcgacgcttccgg

SEQ ID NO: 568 - DNA, 23 bp, Artificial Sequence
  sgRNA
gccagcggcgacgcttccggtgg

SEQ ID NO: 569 - DNA, 23 bp, Artificial Sequence
  sgRNA
ccagcggcgacgcttccggtggg

SEQ ID NO: 570 - DNA, 23 bp, Artificial Sequence
  sgRNA
gcttccggtgggcaccgctgagg

SEQ ID NO: 571 - DNA, 23 bp, Artificial Sequence
  sgRNA
tgaggctactgatcttctcctgg

SEQ ID NO: 572 - DNA, 23 bp, Artificial Sequence
  sgRNA
ctactgatcttctcctggcccgg

SEQ ID NO: 573 - DNA, 23 bp, Artificial Sequence
  sgRNA
tactgatcttctcctggcccggg

SEQ ID NO: 574 - DNA, 23 bp, Artificial Sequence
  sgRNA
actgatcttctcctggcccgggg

SEQ ID NO: 575 - DNA, 23 bp, Artificial Sequence
  sgRNA
agcccgcgccttcttggccctgg

SEQ ID NO: 576 - DNA, 23 bp, Artificial Sequence
  sgRNA
cttgatgaccggcggcggcttgg

SEQ ID NO: 577 - DNA, 23 bp, Artificial Sequence
  sgRNA
ggcggcttggcgaagagccgtgg

SEQ ID NO: 578 - DNA, 23 bp, Artificial Sequence
  sgRNA
gcggcttggcgaagagccgtggg

SEQ ID NO: 579 - DNA, 23 bp, Artificial Sequence
  sgRNA
tggcgaagagccgtgggttctgg

SEQ ID NO: 580 - DNA, 23 bp, Artificial Sequence
  sgRNA
ggcgaagagccgtgggttctggg

SEQ ID NO: 581 - DNA, 23 bp, Artificial Sequence
  sgRNA
gaagtcctccacccgcagcgtgg

SEQ ID NO: 582 - DNA, 23 bp, Artificial Sequence
  sgRNA
gacatgatgagcagcttgagtgg

SEQ ID NO: 583 - DNA, 23 bp, Artificial Sequence
  sgRNA
tgatgagcagcttgagtggcagg

SEQ ID NO: 584 - DNA, 23 bp, Artificial Sequence
  sgRNA
cctgcttcatagagaaactgagg

SEQ ID NO: 585 - DNA, 23 bp, Artificial Sequence
  sgRNA
gagaaactgaggcacctgtgtgg

SEQ ID NO: 586 - DNA, 23 bp, Artificial Sequence
  sgRNA
ctgtgtggtcttcccgctgccgg

SEQ ID NO: 587 - DNA, 23 bp, Artificial Sequence
  sgRNA
ctcaccacacacgatgacgatgg

SEQ ID NO: 588 - DNA, 23 bp, Artificial Sequence
  sgRNA
tcaccacacacgatgacgatggg

SEQ ID NO: 589 - DNA, 23 bp, Artificial Sequence
  sgRNA
caccacacacgatgacgatgggg

SEQ ID NO: 590 - DNA, 23 bp, Artificial Sequence
  sgRNA
cacgatgacgatggggtgctcgg

SEQ ID NO: 591 - DNA, 23 bp, Artificial Sequence
  sgRNA
ctccatgattacttgttcttcgg

SEQ ID NO: 592 - DNA, 23 bp, Artificial Sequence
  sgRNA
acttgttcttcggagagaattgg

SEQ ID NO: 593 - DNA, 23 bp, Artificial Sequence
  sgRNA
cttgttcttcggagagaattggg

SEQ ID NO: 594 - DNA, 23 bp, Artificial Sequence
  sgRNA
tgtggccgggctctggagggtgg

SEQ ID NO: 595 - DNA, 23 bp, Artificial Sequence
  sgRNA
gtggccgggctctggagggtggg

SEQ ID NO: 596 - DNA, 23 bp, Artificial Sequence
  sgRNA
ggaaagccttcctgagcctgcgg

SEQ ID NO: 597 - DNA, 23 bp, Artificial Sequence
  sgRNA
gcacctcagcctgccccgtcagg

SEQ ID NO: 598 - DNA, 23 bp, Artificial Sequence
  sgRNA
cctgccccgtcaggaacaccagg

SEQ ID NO: 599 - DNA, 23 bp, Artificial Sequence
  sgRNA
tttcttccaagcagccagcaagg

SEQ ID NO: 600 - DNA, 23 bp, Artificial Sequence
  sgRNA
aagcagccagcaaggcttcatgg

SEQ ID NO: 601 - DNA, 23 bp, Artificial Sequence
  sgRNA
agtcagccttctctgcaaccagg

SEQ ID NO: 602 - DNA, 23 bp, Artificial Sequence
  sgRNA
gtcagccttctctgcaaccaggg

SEQ ID NO: 603 - DNA, 23 bp, Artificial Sequence
  sgRNA
ctgcaaccagggctcgcagaagg

SEQ ID NO: 604 - DNA, 23 bp, Artificial Sequence
  sgRNA
ctcgcagaaggctctccgtacgg

SEQ ID NO: 605 - DNA, 23 bp, Artificial Sequence
  sgRNA
tcgcagaaggctctccgtacggg

SEQ ID NO: 606 - DNA, 23 bp, Artificial Sequence
  sgRNA
cgcagaaggctctccgtacgggg

SEQ ID NO: 607 - DNA, 23 bp, Artificial Sequence
  sgRNA
ggggccagcagagagtacagcgg

SEQ ID NO: 608 - DNA, 23 bp, Artificial Sequence
  sgRNA
gggccagcagagagtacagcggg

SEQ ID NO: 609 - DNA, 23 bp, Artificial Sequence
  sgRNA
gagagtacagcgggagcacgtgg

SEQ ID NO: 610 - DNA, 23 bp, Artificial Sequence
  sgRNA
tacagcgggagcacgtggagcgg

SEQ ID NO: 611 - DNA, 23 bp, Artificial Sequence
  sgRNA
acagcgggagcacgtggagcggg

SEQ ID NO: 612 - DNA, 23 bp, Artificial Sequence
  sgRNA
gcgggagcacgtggagcgggagg

SEQ ID NO: 613 - DNA, 23 bp, Artificial Sequence
  sgRNA
cgggagcacgtggagcgggaggg

SEQ ID NO: 614 - DNA, 23 bp, Artificial Sequence
  sgRNA
gagcacgtggagcgggagggagg

SEQ ID NO: 615 - DNA, 23 bp, Artificial Sequence
  sgRNA
tggagcgggagggaggcatccgg

SEQ ID NO: 616 - DNA, 23 bp, Artificial Sequence
  sgRNA
cggtggtcagctggccccgcagg

SEQ ID NO: 617 - DNA, 23 bp, Artificial Sequence
  sgRNA
tcagctggccccgcaggcgccgg

SEQ ID NO: 618 - DNA, 23 bp, Artificial Sequence
  sgRNA
caggcgccggatctccatcatgg

SEQ ID NO: 619 - DNA, 23 bp, Artificial Sequence
  sgRNA
ggctttgtaccgcagcccgttgg

SEQ ID NO: 620 - DNA, 23 bp, Artificial Sequence
  sgRNA
gcccgttggcttcgcaaaactgg

SEQ ID NO: 621 - DNA, 23 bp, Artificial Sequence
  sgRNA
cccgttggcttcgcaaaactggg

SEQ ID NO: 622 - DNA, 23 bp, Artificial Sequence
  sgRNA
ccgttggcttcgcaaaactgggg

SEQ ID NO: 623 - DNA, 23 bp, Artificial Sequence
  sgRNA
gcaaaactggggtgtgcagctgg

SEQ ID NO: 624 - DNA, 23 bp, Artificial Sequence
  sgRNA
tgtgcagctggcatactcacagg

SEQ ID NO: 625 - DNA, 23 bp, Artificial Sequence
  sgRNA
ggcatactcacaggctcccacgg

SEQ ID NO: 626 - DNA, 23 bp, Artificial Sequence
  sgRNA
gcggttcccagtgcctagcttgg

SEQ ID NO: 627 - DNA, 23 bp, Artificial Sequence
  sgRNA
cccagtgcctagcttggaagtgg

SEQ ID NO: 628 - DNA, 23 bp, Artificial Sequence
  sgRNA
aaagagtctcatctcagcttcgg

SEQ ID NO: 629 - DNA, 23 bp, Artificial Sequence
  sgRNA
tcatctcagcttcggaagcctgg

SEQ ID NO: 630 - DNA, 23 bp, Artificial Sequence
  sgRNA
gtcctgctctgcccgctcgctgg

SEQ ID NO: 631 - DNA, 23 bp, Artificial Sequence
  sgRNA
ctcgctggtcagctgatgcctgg

SEQ ID NO: 632 - DNA, 23 bp, Artificial Sequence
  sgRNA
tcgctggtcagctgatgcctggg

SEQ ID NO: 633 - DNA, 23 bp, Artificial Sequence
  sgRNA
agctgatgcctgggagacccagg

SEQ ID NO: 634 - DNA, 23 bp, Artificial Sequence
  sgRNA
cctgggagacccaggtgacacgg

SEQ ID NO: 635 - DNA, 23 bp, Artificial Sequence
  sgRNA
ggagacccaggtgacacggaagg

SEQ ID NO: 636 - DNA, 23 bp, Artificial Sequence
  sgRNA
gacccaggtgacacggaaggagg

SEQ ID NO: 637 - DNA, 23 bp, Artificial Sequence
  sgRNA
aggaggatacgccagtgacgcgg

SEQ ID NO: 638 - DNA, 23 bp, Artificial Sequence
  sgRNA
tccaccacgtacttgatgccagg

SEQ ID NO: 639 - DNA, 23 bp, Artificial Sequence
  sgRNA
ccaccacgtacttgatgccaggg

SEQ ID NO: 640 - DNA, 23 bp, Artificial Sequence
  sgRNA
cacgtacttgatgccagggatgg

SEQ ID NO: 641 - DNA, 23 bp, Artificial Sequence
  sgRNA
agggatggtaagcgacgtctcgg

SEQ ID NO: 642 - DNA, 23 bp, Artificial Sequence
  sgRNA
aagcgacgtctcggccacattgg

SEQ ID NO: 643 - DNA, 23 bp, Artificial Sequence
  sgRNA
cgacgtctcggccacattggtgg

SEQ ID NO: 644 - DNA, 23 bp, Artificial Sequence
  sgRNA
acacacaaccgagtcccctccgg

SEQ ID NO: 645 - DNA, 23 bp, Artificial Sequence
  sgRNA
cacaaccgagtcccctccggtgg

SEQ ID NO: 646 - DNA, 23 bp, Artificial Sequence
  sgRNA
aaccgagtcccctccggtggagg

SEQ ID NO: 647 - DNA, 23 bp, Artificial Sequence
  sgRNA
acacagcacccgcccccgctcgg

SEQ ID NO: 648 - DNA, 23 bp, Artificial Sequence
  sgRNA
cacagcacccgcccccgctcggg

SEQ ID NO: 649 - DNA, 23 bp, Artificial Sequence
  sgRNA
acagcacccgcccccgctcgggg

SEQ ID NO: 650 - DNA, 23 bp, Artificial Sequence
  sgRNA
ccccgctcggggcagtatgtagg

SEQ ID NO: 651 - DNA, 23 bp, Artificial Sequence
  sgRNA
cccgctcggggcagtatgtaggg

SEQ ID NO: 652 - DNA, 23 bp, Artificial Sequence
  sgRNA
ccgctcggggcagtatgtagggg

SEQ ID NO: 653 - DNA, 23 bp, Artificial Sequence
  sgRNA
tcggggcagtatgtaggggctgg

SEQ ID NO: 654 - DNA, 23 bp, Artificial Sequence
  sgRNA
atgtaggggctggttcctccagg

SEQ ID NO: 655 - DNA, 23 bp, Artificial Sequence
  sgRNA
tgtaggggctggttcctccaggg

SEQ ID NO: 656 - DNA, 23 bp, Artificial Sequence
  sgRNA
gtaggggctggttcctccagggg

SEQ ID NO: 657 - DNA, 23 bp, Artificial Sequence
  sgRNA
cctccaggggcttgtcaaactgg

SEQ ID NO: 658 - DNA, 23 bp, Artificial Sequence
  sgRNA
cttgtcaaactggcagtaagagg

SEQ ID NO: 659 - DNA, 23 bp, Artificial Sequence
  sgRNA
ttgtcaaactggcagtaagaggg

SEQ ID NO: 660 - DNA, 23 bp, Artificial Sequence
  sgRNA
actggcagtaagagggcagcagg

SEQ ID NO: 661 - DNA, 23 bp, Artificial Sequence
  sgRNA
ctggcagtaagagggcagcaggg

SEQ ID NO: 662 - DNA, 23 bp, Artificial Sequence
  sgRNA
cagtaagagggcagcagggccgg

SEQ ID NO: 663 - DNA, 23 bp, Artificial Sequence
  sgRNA
agtaagagggcagcagggccggg

SEQ ID NO: 664 - DNA, 23 bp, Artificial Sequence
  sgRNA
gcagcagggccgggatccactgg

SEQ ID NO: 665 - DNA, 23 bp, Artificial Sequence
  sgRNA
atccgtcatgaacttgattctgg

SEQ ID NO: 666 - DNA, 23 bp, Artificial Sequence
  sgRNA
ctgtcacgtttccttcataccgg

SEQ ID NO: 667 - DNA, 23 bp, Artificial Sequence
  sgRNA
cgtttccttcataccggatctgg

SEQ ID NO: 668 - DNA, 23 bp, Artificial Sequence
  sgRNA
tccttcataccggatctggtagg

SEQ ID NO: 669 - DNA, 23 bp, Artificial Sequence
  sgRNA
cctccagttccagctgcacgggg

SEQ ID NO: 670 - DNA, 23 bp, Artificial Sequence
  sgRNA
ctccagttccagctgcacggggg

SEQ ID NO: 671 - DNA, 23 bp, Artificial Sequence
  sgRNA
tccagttccagctgcacgggggg

SEQ ID NO: 672 - DNA, 23 bp, Artificial Sequence
  sgRNA
agttccagctgcacggggggcgg

SEQ ID NO: 673 - DNA, 23 bp, Artificial Sequence
  sgRNA
cagctgcacggggggcggctcgg

SEQ ID NO: 674 - DNA, 23 bp, Artificial Sequence
  sgRNA
agctgcacggggggcggctcggg

SEQ ID NO: 675 - DNA, 23 bp, Artificial Sequence
  sgRNA
gctgcacggggggcggctcgggg

SEQ ID NO: 676 - DNA, 23 bp, Artificial Sequence
  sgRNA
ctgcacggggggcggctcggggg

SEQ ID NO: 677 - DNA, 23 bp, Artificial Sequence
  sgRNA
tgcacggggggcggctcgggggg

SEQ ID NO: 678 - DNA, 23 bp, Artificial Sequence
  sgRNA
gcacggggggcggctcggggggg

SEQ ID NO: 679 - DNA, 23 bp, Artificial Sequence
  sgRNA
cggctcgggggggcccttcgagg

SEQ ID NO: 680 - DNA, 23 bp, Artificial Sequence
  sgRNA
ggctcgggggggcccttcgaggg

SEQ ID NO: 681 - DNA, 23 bp, Artificial Sequence
  sgRNA
gggggggcccttcgagggtccgg

SEQ ID NO: 682 - DNA, 23 bp, Artificial Sequence
  sgRNA
ggggggcccttcgagggtccggg

SEQ ID NO: 683 - DNA, 23 bp, Artificial Sequence
  sgRNA
gggggcccttcgagggtccgggg

SEQ ID NO: 684 - DNA, 23 bp, Artificial Sequence
  sgRNA
agggtccggggcccgcctgctgg

SEQ ID NO: 685 - DNA, 23 bp, Artificial Sequence
  sgRNA
gccccttgatgttgtagcgccgg

SEQ ID NO: 686 - DNA, 23 bp, Artificial Sequence
  sgRNA
gcgccggcgcagcttccccatgg

SEQ ID NO: 687 - DNA, 23 bp, Artificial Sequence
  sgRNA
gcagcttccccatggcgactagg

SEQ ID NO: 688 - DNA, 23 bp, Artificial Sequence
  sgRNA
ttccccatggcgactaggccagg

SEQ ID NO: 689 - DNA, 23 bp, Artificial Sequence
  sgRNA
tccccatggcgactaggccaggg

SEQ ID NO: 690 - DNA, 23 bp, Artificial Sequence
  sgRNA
ccatggcgactaggccagggtgg

SEQ ID NO: 691 - DNA, 23 bp, Artificial Sequence
  sgRNA
catggcgactaggccagggtggg

SEQ ID NO: 692 - DNA, 23 bp, Artificial Sequence
  sgRNA
ggccagggtgggcgctccagcgg

SEQ ID NO: 693 - DNA, 23 bp, Artificial Sequence
  sgRNA
agggtgggcgctccagcggccgg

SEQ ID NO: 694 - DNA, 23 bp, Artificial Sequence
  sgRNA
aatccgaaacccagcccacgtgg

SEQ ID NO: 695 - DNA, 23 bp, Artificial Sequence
  sgRNA
atccgaaacccagcccacgtggg

SEQ ID NO: 696 - DNA, 23 bp, Artificial Sequence
  sgRNA
ggttcccagaccaccaactccgg

SEQ ID NO: 697 - DNA, 23 bp, Artificial Sequence
  sgRNA
cgttgagcgccttcatttgaagg

SEQ ID NO: 698 - DNA, 23 bp, Artificial Sequence
  sgRNA
tgaaggattaagtcttcaacagg

SEQ ID NO: 699 - DNA, 23 bp, Artificial Sequence
  sgRNA
ttaagtcttcaacaggcctccgg

SEQ ID NO: 700 - DNA, 23 bp, Artificial Sequence
  sgRNA
taagtcttcaacaggcctccggg

SEQ ID NO: 701 - DNA, 23 bp, Artificial Sequence
  sgRNA
acaggcctccgggtgatttctgg

SEQ ID NO: 702 - DNA, 23 bp, Artificial Sequence
  sgRNA
ggcctccgggtgatttctggagg

SEQ ID NO: 703 - DNA, 23 bp, Artificial Sequence
  sgRNA
ctccgggtgatttctggaggagg

SEQ ID NO: 704 - DNA, 23 bp, Artificial Sequence
  sgRNA
agaagccccctgccctgcccagg

SEQ ID NO: 705 - DNA, 23 bp, Artificial Sequence
  sgRNA
ctgcccaggtcctcttcatctgg

SEQ ID NO: 706 - DNA, 23 bp, Artificial Sequence
  sgRNA
tgcccaggtcctcttcatctggg

SEQ ID NO: 707 - DNA, 23 bp, Artificial Sequence
  sgRNA
tcctcttcatctgggccacccgg

SEQ ID NO: 708 - DNA, 23 bp, Artificial Sequence
  sgRNA
cctcttcatctgggccacccggg

SEQ ID NO: 709 - DNA, 23 bp, Artificial Sequence
  sgRNA
ggcccgcttgctcttcagcctgg

SEQ ID NO: 710 - DNA, 23 bp, Artificial Sequence
  sgRNA
cctggtgagctcctcgtcactgg

SEQ ID NO: 711 - DNA, 23 bp, Artificial Sequence
  sgRNA
agctcctcgtcactggccgctgg

SEQ ID NO: 712 - DNA, 23 bp, Artificial Sequence
  sgRNA
cagctcccgcaccgtcatgctgg

SEQ ID NO: 713 - DNA, 23 bp, Artificial Sequence
  sgRNA
caccgtcatgctggccacgatgg

SEQ ID NO: 714 - DNA, 23 bp, Artificial Sequence
  sgRNA
catgctggccacgatggtgatgg

SEQ ID NO: 715 - DNA, 23 bp, Artificial Sequence
  sgRNA
ggccacgatggtgatggcatagg

SEQ ID NO: 716 - DNA, 23 bp, Artificial Sequence
  sgRNA
gccacgatggtgatggcataggg

SEQ ID NO: 717 - DNA, 23 bp, Artificial Sequence
  sgRNA
cgatggtgatggcatagggcagg

SEQ ID NO: 718 - DNA, 23 bp, Artificial Sequence
  sgRNA
agggcaggcagccgtgttgtcgg

SEQ ID NO: 719 - DNA, 23 bp, Artificial Sequence
  sgRNA
gtgccagcatcttagcgtagcgg

SEQ ID NO: 720 - DNA, 23 bp, Artificial Sequence
  sgRNA
tgccagcatcttagcgtagcggg

SEQ ID NO: 721 - DNA, 23 bp, Artificial Sequence
  sgRNA
gccagcatcttagcgtagcgggg

SEQ ID NO: 722 - DNA, 23 bp, Artificial Sequence
  sgRNA
cttagcgtagcggggtgccacgg

SEQ ID NO: 723 - DNA, 23 bp, Artificial Sequence
  sgRNA
ttagcgtagcggggtgccacggg

SEQ ID NO: 724 - DNA, 23 bp, Artificial Sequence
  sgRNA
tagcgtagcggggtgccacgggg

SEQ ID NO: 725 - DNA, 23 bp, Artificial Sequence
  sgRNA
gcggggtgccacggggaatgtgg

SEQ ID NO: 726 - DNA, 23 bp, Artificial Sequence
  sgRNA
cggggaatgtggccattgtccgg

SEQ ID NO: 727 - DNA, 23 bp, Artificial Sequence
  sgRNA
tgtccggcccagcgcagtgatgg

SEQ ID NO: 728 - DNA, 23 bp, Artificial Sequence
  sgRNA
gtccggcccagcgcagtgatggg

SEQ ID NO: 729 - DNA, 23 bp, Artificial Sequence
  sgRNA
tccggcccagcgcagtgatgggg

SEQ ID NO: 730 - DNA, 23 bp, Artificial Sequence
  sgRNA
cagtgatggggcagctcagccgg

SEQ ID NO: 731 - DNA, 23 bp, Artificial Sequence
  sgRNA
ctgcccttccagcaggaaccggg

SEQ ID NO: 732 - DNA, 23 bp, Artificial Sequence
  sgRNA
accgggcaaagtgcttgtagcgg

SEQ ID NO: 733 - DNA, 23 bp, Artificial Sequence
  sgRNA
ttgtagcggtcaatcccctctgg

SEQ ID NO: 734 - DNA, 23 bp, Artificial Sequence
  sgRNA
ctctggaaaatccacctcgatgg

SEQ ID NO: 735 - DNA, 23 bp, Artificial Sequence
  sgRNA
tggaaaatccacctcgatggcgg

SEQ ID NO: 736 - DNA, 23 bp, Artificial Sequence
  sgRNA
ggaaaatccacctcgatggcggg

SEQ ID NO: 737 - DNA, 23 bp, Artificial Sequence
  sgRNA
gaaaatccacctcgatggcgggg

SEQ ID NO: 738 - DNA, 23 bp, Artificial Sequence
  sgRNA
tccacctcgatggcggggagcgg

SEQ ID NO: 739 - DNA, 23 bp, Artificial Sequence
  sgRNA
catcttgcccgccatcccccagg

SEQ ID NO: 740 - DNA, 23 bp, Artificial Sequence
  sgRNA
catcccccaggtccagatcgagg

SEQ ID NO: 741 - DNA, 23 bp, Artificial Sequence
  sgRNA
ccccaggtccagatcgaggtcgg

SEQ ID NO: 742 - DNA, 23 bp, Artificial Sequence
  sgRNA
ccagatcgaggtcggagtccagg

SEQ ID NO: 743 - DNA, 23 bp, Artificial Sequence
  sgRNA
cagatcgaggtcggagtccaggg

SEQ ID NO: 744 - DNA, 23 bp, Artificial Sequence
  sgRNA
tcctcatcgccttcgcctgccgg

SEQ ID NO: 745 - DNA, 23 bp, Artificial Sequence
  sgRNA
agtaatgatccaagttgatctgg

SEQ ID NO: 746 - DNA, 23 bp, Artificial Sequence
  sgRNA
gtaatgatccaagttgatctggg

SEQ ID NO: 747 - DNA, 23 bp, Artificial Sequence
  sgRNA
taatgatccaagttgatctgggg

SEQ ID NO: 748 - DNA, 23 bp, Artificial Sequence
  sgRNA
ctgctttctggggcggttgcagg

SEQ ID NO: 749 - DNA, 23 bp, Artificial Sequence
  sgRNA
tgctttctggggcggttgcaggg

SEQ ID NO: 750 - DNA, 23 bp, Artificial Sequence
  sgRNA
cagtgcgatcaacagctcctcgg

SEQ ID NO: 751 - DNA, 23 bp, Artificial Sequence
  sgRNA
tgcgatcaacagctcctcggcgg

SEQ ID NO: 752 - DNA, 23 bp, Artificial Sequence
  sgRNA
acagctcctcggcggcaagaagg

SEQ ID NO: 753 - DNA, 23 bp, Artificial Sequence
  sgRNA
cagctcctcggcggcaagaaggg

SEQ ID NO: 754 - DNA, 23 bp, Artificial Sequence
  sgRNA
ggcggcaagaagggcttccacgg

SEQ ID NO: 755 - DNA, 23 bp, Artificial Sequence
  sgRNA
ggcaagaagggcttccacggagg

SEQ ID NO: 756 - DNA, 23 bp, Artificial Sequence
  sgRNA
gcaagaagggcttccacggaggg

SEQ ID NO: 757 - DNA, 23 bp, Artificial Sequence
  sgRNA
caagaagggcttccacggagggg

SEQ ID NO: 758 - DNA, 23 bp, Artificial Sequence
  sgRNA
aagaagggcttccacggaggggg

SEQ ID NO: 759 - DNA, 23 bp, Artificial Sequence
  sgRNA
agaagggcttccacggagggggg

SEQ ID NO: 760 - DNA, 23 bp, Artificial Sequence
  sgRNA
gcttccacggaggggggcgtcgg

SEQ ID NO: 761 - DNA, 23 bp, Artificial Sequence
  sgRNA
cttccacggaggggggcgtcggg

SEQ ID NO: 762 - DNA, 23 bp, Artificial Sequence
  sgRNA
cacggaggggggcgtcgggaagg

SEQ ID NO: 763 - DNA, 23 bp, Artificial Sequence
  sgRNA
acggaggggggcgtcgggaaggg

SEQ ID NO: 764 - DNA, 23 bp, Artificial Sequence
  sgRNA
cggaggggggcgtcgggaagggg

SEQ ID NO: 765 - DNA, 23 bp, Artificial Sequence
  sgRNA
ggtggatcttgcagaccttccgg

SEQ ID NO: 766 - DNA, 23 bp, Artificial Sequence
  sgRNA
tcgccactgtagtcttccagcgg

SEQ ID NO: 767 - DNA, 23 bp, Artificial Sequence
  sgRNA
ttgttgaaatgcacagtcactgg

SEQ ID NO: 768 - DNA, 23 bp, Artificial Sequence
  sgRNA
tgttgaaatgcacagtcactggg

SEQ ID NO: 769 - DNA, 23 bp, Artificial Sequence
  sgRNA
cacagtcactgggaactgcctgg

SEQ ID NO: 770 - DNA, 23 bp, Artificial Sequence
  sgRNA
ccacgtcttcagcatggtgccgg

SEQ ID NO: 771 - DNA, 23 bp, Artificial Sequence
  sgRNA
cacgtcttcagcatggtgccggg

SEQ ID NO: 772 - DNA, 23 bp, Artificial Sequence
  sgRNA
acgtcttcagcatggtgccgggg

SEQ ID NO: 773 - DNA, 23 bp, Artificial Sequence
  sgRNA
cttcagcatggtgccggggctgg

SEQ ID NO: 774 - DNA, 23 bp, Artificial Sequence
  sgRNA
ggctggacagcagacagctccgg

SEQ ID NO: 775 - DNA, 23 bp, Artificial Sequence
  sgRNA
cagcagacagctccggtatgagg

SEQ ID NO: 776 - DNA, 23 bp, Artificial Sequence
  sgRNA
tccggtatgaggccagcttgcgg

SEQ ID NO: 777 - DNA, 23 bp, Artificial Sequence
  sgRNA
cagcactttcttctccttcttgg

SEQ ID NO: 778 - DNA, 23 bp, Artificial Sequence
  sgRNA
ttcttctccttcttggtcagagg

SEQ ID NO: 779 - DNA, 23 bp, Artificial Sequence
  sgRNA
gcttcttctccttcttcgacagg

SEQ ID NO: 780 - DNA, 23 bp, Artificial Sequence
  sgRNA
cttcttctccttcttcgacaggg

SEQ ID NO: 781 - DNA, 23 bp, Artificial Sequence
  sgRNA
ttcttctccttcttcgacagggg

SEQ ID NO: 782 - DNA, 23 bp, Artificial Sequence
  sgRNA
ttctccttcttcgacaggggagg

SEQ ID NO: 783 - DNA, 23 bp, Artificial Sequence
  sgRNA
tctccttcttcgacaggggaggg

SEQ ID NO: 784 - DNA, 23 bp, Artificial Sequence
  sgRNA
ctccttcttcgacaggggagggg

SEQ ID NO: 785 - DNA, 23 bp, Artificial Sequence
  sgRNA
cttcgacaggggaggggctttgg

SEQ ID NO: 786 - DNA, 23 bp, Artificial Sequence
  sgRNA
gtcttctttttcttcttccccgg

SEQ ID NO: 787 - DNA, 23 bp, Artificial Sequence
  sgRNA
cctccagcatctcctcgctctgg

SEQ ID NO: 788 - DNA, 23 bp, Artificial Sequence
  sgRNA
tctcctcgctctggaccctgcgg

SEQ ID NO: 789 - DNA, 23 bp, Artificial Sequence
  sgRNA
ctcctcgctctggaccctgcggg

SEQ ID NO: 790 - DNA, 23 bp, Artificial Sequence
  sgRNA
tctggaccctgcgggccaagtgg

SEQ ID NO: 791 - DNA, 23 bp, Artificial Sequence
  sgRNA
tgcgggccaagtggtcccccagg

SEQ ID NO: 792 - DNA, 23 bp, Artificial Sequence
  sgRNA
ctgccgtcacgatctgtcgcagg

SEQ ID NO: 793 - DNA, 23 bp, Artificial Sequence
  sgRNA
cgtcacgatctgtcgcaggtagg

SEQ ID NO: 794 - DNA, 23 bp, Artificial Sequence
  sgRNA
tctgtcgcaggtaggtcacctgg

SEQ ID NO: 795 - DNA, 23 bp, Artificial Sequence
  sgRNA
caggtaggtcacctggctctcgg

SEQ ID NO: 796 - DNA, 23 bp, Artificial Sequence
  sgRNA
gtaggtcacctggctctcggtgg

SEQ ID NO: 797 - DNA, 23 bp, Artificial Sequence
  sgRNA
taggtcacctggctctcggtggg

SEQ ID NO: 798 - DNA, 23 bp, Artificial Sequence
  sgRNA
gtcacctggctctcggtgggcgg

SEQ ID NO: 799 - DNA, 23 bp, Artificial Sequence
  sgRNA
ctcggtgggcggctgcatcttgg

SEQ ID NO: 800 - DNA, 23 bp, Artificial Sequence
  sgRNA
tcggtgggcggctgcatcttggg

SEQ ID NO: 801 - DNA, 23 bp, Artificial Sequence
  sgRNA
atccacgaagagctcagcctcgg

SEQ ID NO: 802 - DNA, 23 bp, Artificial Sequence
  sgRNA
tccacgaagagctcagcctcggg

SEQ ID NO: 803 - DNA, 23 bp, Artificial Sequence
  sgRNA
ccacgaagagctcagcctcgggg

SEQ ID NO: 804 - DNA, 23 bp, Artificial Sequence
  sgRNA
gagctcagcctcggggcacacgg

SEQ ID NO: 805 - DNA, 23 bp, Artificial Sequence
  sgRNA
tagtggtctccacgatttcctgg

SEQ ID NO: 806 - DNA, 23 bp, Artificial Sequence
  sgRNA
ttcctggtagaccacaaactcgg

SEQ ID NO: 807 - DNA, 23 bp, Artificial Sequence
  sgRNA
tcctggtagaccacaaactcggg

SEQ ID NO: 808 - DNA, 23 bp, Artificial Sequence
  sgRNA
cctggtagaccacaaactcgggg

SEQ ID NO: 809 - DNA, 23 bp, Artificial Sequence
  sgRNA
actcggggagctctttgaaaagg

SEQ ID NO: 810 - DNA, 23 bp, Artificial Sequence
  sgRNA
ggggagctctttgaaaaggacgg

SEQ ID NO: 811 - DNA, 23 bp, Artificial Sequence
  sgRNA
ctctttgaaaaggacggagctgg

SEQ ID NO: 812 - DNA, 23 bp, Artificial Sequence
  sgRNA
tctttgaaaaggacggagctggg

SEQ ID NO: 813 - DNA, 23 bp, Artificial Sequence
  sgRNA
ctttgaaaaggacggagctgggg

SEQ ID NO: 814 - DNA, 23 bp, Artificial Sequence
  sgRNA
tgaaaaggacggagctggggtgg

SEQ ID NO: 815 - DNA, 23 bp, Artificial Sequence
  sgRNA
gagctggggtggatgaagacagg

SEQ ID NO: 816 - DNA, 23 bp, Artificial Sequence
  sgRNA
agctggggtggatgaagacaggg

SEQ ID NO: 817 - DNA, 23 bp, Artificial Sequence
  sgRNA
ggatgaagacagggtcgtcgagg

SEQ ID NO: 818 - DNA, 23 bp, Artificial Sequence
  sgRNA
aagacagggtcgtcgaggagagg

SEQ ID NO: 819 - DNA, 23 bp, Artificial Sequence
  sgRNA
agacagggtcgtcgaggagaggg

SEQ ID NO: 820 - DNA, 23 bp, Artificial Sequence
  sgRNA
gacagggtcgtcgaggagagggg

SEQ ID NO: 821 - DNA, 23 bp, Artificial Sequence
  sgRNA
tagattcacagaaaatgacaagg

SEQ ID NO: 822 - DNA, 23 bp, Artificial Sequence
  sgRNA
agaaaatgacaaggagtatcagg

SEQ ID NO: 823 - DNA, 23 bp, Artificial Sequence
  sgRNA
tgagtctcctccaattgttgagg

SEQ ID NO: 824 - DNA, 23 bp, Artificial Sequence
  sgRNA
ctcctccaattgttgaggaatgg

SEQ ID NO: 825 - DNA, 23 bp, Artificial Sequence
  sgRNA
gaggaatggaatagcagagctgg

SEQ ID NO: 826 - DNA, 23 bp, Artificial Sequence
  sgRNA
gaatggaatagcagagctggtgg

SEQ ID NO: 827 - DNA, 23 bp, Artificial Sequence
  sgRNA
aatggaatagcagagctggtggg

SEQ ID NO: 828 - DNA, 23 bp, Artificial Sequence
  sgRNA
ggtgggaaccaaagaaacagagg

SEQ ID NO: 829 - DNA, 23 bp, Artificial Sequence
  sgRNA
caagacaacagacagttcagagg

SEQ ID NO: 830 - DNA, 23 bp, Artificial Sequence
  sgRNA
acaacagacagttcagaggcagg

SEQ ID NO: 831 - DNA, 23 bp, Artificial Sequence
  sgRNA
caacagacagttcagaggcaggg

SEQ ID NO: 832 - DNA, 23 bp, Artificial Sequence
  sgRNA
tcagaggcagggacaacagatgg

SEQ ID NO: 833 - DNA, 23 bp, Artificial Sequence
  sgRNA
cagaggcagggacaacagatggg

SEQ ID NO: 834 - DNA, 23 bp, Artificial Sequence
  sgRNA
agaggcagggacaacagatgggg

SEQ ID NO: 835 - DNA, 23 bp, Artificial Sequence
  sgRNA
gaggcagggacaacagatggggg

SEQ ID NO: 836 - DNA, 23 bp, Artificial Sequence
  sgRNA
gcagggacaacagatgggggtgg

SEQ ID NO: 837 - DNA, 23 bp, Artificial Sequence
  sgRNA
gtgacaatcgatccaatcagtgg

SEQ ID NO: 838 - DNA, 23 bp, Artificial Sequence
  sgRNA
aatcgatccaatcagtggcatgg

SEQ ID NO: 839 - DNA, 23 bp, Artificial Sequence
  sgRNA
atcagtggcatggacgatcctgg

SEQ ID NO: 840 - DNA, 23 bp, Artificial Sequence
  sgRNA
tcagtggcatggacgatcctggg

SEQ ID NO: 841 - DNA, 23 bp, Artificial Sequence
  sgRNA
cagtggcatggacgatcctgggg

SEQ ID NO: 842 - DNA, 23 bp, Artificial Sequence
  sgRNA
ccttactatccccagcaatatgg

SEQ ID NO: 843 - DNA, 23 bp, Artificial Sequence
  sgRNA
ccccagcaatatggacattatgg

SEQ ID NO: 844 - DNA, 23 bp, Artificial Sequence
  sgRNA
gacattatggttacaaccagcgg

SEQ ID NO: 845 - DNA, 23 bp, Artificial Sequence
  sgRNA
tacaaccagcggcctccttacgg

SEQ ID NO: 846 - DNA, 23 bp, Artificial Sequence
  sgRNA
gttactactgatagaaatgttgg

SEQ ID NO: 847 - DNA, 23 bp, Artificial Sequence
  sgRNA
ctgttaccatgagaaaagtttgg

SEQ ID NO: 848 - DNA, 23 bp, Artificial Sequence
  sgRNA
tgttaccatgagaaaagtttggg

SEQ ID NO: 849 - DNA, 23 bp, Artificial Sequence
  sgRNA
aaagtttgggtgtcttctgttgg

SEQ ID NO: 850 - DNA, 23 bp, Artificial Sequence
  sgRNA
ttacatctgattttacagaatgg

SEQ ID NO: 851 - DNA, 23 bp, Artificial Sequence
  sgRNA
agaatggattattgattttttgg

SEQ ID NO: 852 - DNA, 23 bp, Artificial Sequence
  sgRNA
atcttacttgcgaaatgcgatgg

SEQ ID NO: 853 - DNA, 23 bp, Artificial Sequence
  sgRNA
ttgcgaaatgcgatggttgctgg

SEQ ID NO: 854 - DNA, 23 bp, Artificial Sequence
  sgRNA
tgcgaaatgcgatggttgctggg

SEQ ID NO: 855 - DNA, 23 bp, Artificial Sequence
  sgRNA
gctgggaatacctgaaactgtgg

SEQ ID NO: 856 - DNA, 23 bp, Artificial Sequence
  sgRNA
acttaatagtgctttaagtttgg

SEQ ID NO: 857 - DNA, 23 bp, Artificial Sequence
  sgRNA
tggtatattatttgacctctagg

SEQ ID NO: 858 - DNA, 23 bp, Artificial Sequence
  sgRNA
gaaaatgcttttactttgtaagg

SEQ ID NO: 859 - DNA, 23 bp, Artificial Sequence
  sgRNA
gctcgtttctaaaattctagagg

SEQ ID NO: 860 - DNA, 23 bp, Artificial Sequence
  sgRNA
acataacatcagcagttgaaagg

SEQ ID NO: 861 - DNA, 23 bp, Artificial Sequence
  sgRNA
ttgcatttgttaagtgactatgg

SEQ ID NO: 862 - DNA, 23 bp, Artificial Sequence
  sgRNA
acacttgagtctctttttagagg

SEQ ID NO: 863 - DNA, 23 bp, Artificial Sequence
  sgRNA
cacttgagtctctttttagaggg

SEQ ID NO: 864 - DNA, 23 bp, Artificial Sequence
  sgRNA
agtaataaagctgtaaaataagg

SEQ ID NO: 865 - DNA, 23 bp, Artificial Sequence
  sgRNA
ataaagctgtaaaataaggaagg

SEQ ID NO: 866 - DNA, 23 bp, Artificial Sequence
  sgRNA
tgtcagtttgtgtcttgatctgg

SEQ ID NO: 867 - DNA, 23 bp, Artificial Sequence
  sgRNA
cagtttgtgtcttgatctggtgg

SEQ ID NO: 868 - DNA, 23 bp, Artificial Sequence
  sgRNA
tttgtgtcttgatctggtggtgg

SEQ ID NO: 869 - DNA, 23 bp, Artificial Sequence
  sgRNA
tgtcttgatctggtggtggttgg

SEQ ID NO: 870 - DNA, 23 bp, Artificial Sequence
  sgRNA
gtcttgatctggtggtggttggg

SEQ ID NO: 871 - DNA, 23 bp, Artificial Sequence
  sgRNA
atctggtggtggttgggataagg

SEQ ID NO: 872 - DNA, 23 bp, Artificial Sequence
  sgRNA
tctggtggtggttgggataaggg

SEQ ID NO: 873 - DNA, 23 bp, Artificial Sequence
  sgRNA
ctttttgctaacaacatagcagg

SEQ ID NO: 874 - DNA, 23 bp, Artificial Sequence
  sgRNA
taaataatgctgcattttgatgg

SEQ ID NO: 875 - DNA, 23 bp, Artificial Sequence
  sgRNA
tttgatggttcttacttttttgg

SEQ ID NO: 876 - DNA, 23 bp, Artificial Sequence
  sgRNA
tacttttttggtatttaatgtgg

SEQ ID NO: 877 - DNA, 23 bp, Artificial Sequence
  sgRNA
acttttttggtatttaatgtggg

SEQ ID NO: 878 - DNA, 23 bp, Artificial Sequence
  sgRNA
gtacagctgcctcaaacctttgg

SEQ ID NO: 879 - DNA, 23 bp, Artificial Sequence
  sgRNA
tacagctgcctcaaacctttggg

SEQ ID NO: 880 - DNA, 23 bp, Artificial Sequence
  sgRNA
aggtggttgtcggattttagagg

SEQ ID NO: 881 - DNA, 23 bp, Artificial Sequence
  sgRNA
ggttgtcggattttagaggaagg

SEQ ID NO: 882 - DNA, 23 bp, Artificial Sequence
  sgRNA
ggattttagaggaaggcgctcgg

SEQ ID NO: 883 - DNA, 23 bp, Artificial Sequence
  sgRNA
aggaaggcgctcggttacattgg

SEQ ID NO: 884 - DNA, 23 bp, Artificial Sequence
  sgRNA
gctcggttacattggagaactgg

SEQ ID NO: 885 - DNA, 23 bp, Artificial Sequence
  sgRNA
gttacattggagaactggagtgg

SEQ ID NO: 886 - DNA, 23 bp, Artificial Sequence
  sgRNA
attggagaactggagtggtctgg

SEQ ID NO: 887 - DNA, 23 bp, Artificial Sequence
  sgRNA
tggagtggtctggagttccacgg

SEQ ID NO: 888 - DNA, 23 bp, Artificial Sequence
  sgRNA
tctggagttccacggtgtagtgg

SEQ ID NO: 889 - DNA, 23 bp, Artificial Sequence
  sgRNA
tccacggtgtagtggaccagagg

SEQ ID NO: 890 - DNA, 23 bp, Artificial Sequence
  sgRNA
ggaccagaggccacctctcctgg

SEQ ID NO: 891 - DNA, 23 bp, Artificial Sequence
  sgRNA
gaccagaggccacctctcctggg

SEQ ID NO: 892 - DNA, 23 bp, Artificial Sequence
  sgRNA
tgggcttctcagtgtctcgccgg

SEQ ID NO: 893 - DNA, 23 bp, Artificial Sequence
  sgRNA
gcttctcagtgtctcgccggcgg

SEQ ID NO: 894 - DNA, 23 bp, Artificial Sequence
  sgRNA
cttctcagtgtctcgccggcggg

SEQ ID NO: 895 - DNA, 23 bp, Artificial Sequence
  sgRNA
ttctcagtgtctcgccggcgggg

SEQ ID NO: 896 - DNA, 23 bp, Artificial Sequence
  sgRNA
agtgtctcgccggcggggttcgg

SEQ ID NO: 897 - DNA, 23 bp, Artificial Sequence
  sgRNA
cggcggggttcggcctgagctgg

SEQ ID NO: 898 - DNA, 23 bp, Artificial Sequence
  sgRNA
agctggattgacatagcccttgg

SEQ ID NO: 899 - DNA, 23 bp, Artificial Sequence
  sgRNA
tggattgacatagcccttggcgg

SEQ ID NO: 900 - DNA, 23 bp, Artificial Sequence
  sgRNA
ctattccattcctcaacaattgg

SEQ ID NO: 901 - DNA, 23 bp, Artificial Sequence
  sgRNA
ttccattcctcaacaattggagg

SEQ ID NO: 902 - DNA, 23 bp, Artificial Sequence
  sgRNA
tcaacaattggaggagactcagg

SEQ ID NO: 903 - DNA, 23 bp, Artificial Sequence
  sgRNA
acaattggaggagactcaggagg

SEQ ID NO: 904 - DNA, 23 bp, Artificial Sequence
  sgRNA
caattggaggagactcaggaggg

SEQ ID NO: 905 - DNA, 23 bp, Artificial Sequence
  sgRNA
gagactcaggagggcgtttcagg

SEQ ID NO: 906 - DNA, 23 bp, Artificial Sequence
  sgRNA
gcaaacatctcttcaaactttgg

SEQ ID NO: 907 - DNA, 23 bp, Artificial Sequence
  sgRNA
ttcaaactttggaacagcttcgg

SEQ ID NO: 908 - DNA, 23 bp, Artificial Sequence
  sgRNA
aatagaatgatctctgtgaaagg

SEQ ID NO: 909 - DNA, 23 bp, Artificial Sequence
  sgRNA
tttatagcatcactatttatagg

SEQ ID NO: 910 - DNA, 23 bp, Artificial Sequence
  sgRNA
tataggagagaaagcagcagagg

SEQ ID NO: 911 - DNA, 23 bp, Artificial Sequence
  sgRNA
aagcagcagaggtatgcatctgg

SEQ ID NO: 912 - DNA, 23 bp, Artificial Sequence
  sgRNA
caaaatgcagcattatttacagg

SEQ ID NO: 913 - DNA, 23 bp, Artificial Sequence
  sgRNA
tctaaaaagagactcaagtgtgg

SEQ ID NO: 914 - DNA, 23 bp, Artificial Sequence
  sgRNA
gctgactcatctatagattaagg

SEQ ID NO: 915 - DNA, 23 bp, Artificial Sequence
  sgRNA
aacgagcacatctaagcatatgg

SEQ ID NO: 916 - DNA, 23 bp, Artificial Sequence
  sgRNA
gtaaaacaaagaattcctagagg

SEQ ID NO: 917 - DNA, 23 bp, Artificial Sequence
  sgRNA
atgaaacaaagaagattctgagg

SEQ ID NO: 918 - DNA, 23 bp, Artificial Sequence
  sgRNA
gcaatataatccacagtttcagg

SEQ ID NO: 919 - DNA, 23 bp, Artificial Sequence
  sgRNA
agacacccaaacttttctcatgg

SEQ ID NO: 920 - DNA, 23 bp, Artificial Sequence
  sgRNA
ttctatcagtagtaaccgtaagg

SEQ ID NO: 921 - DNA, 23 bp, Artificial Sequence
  sgRNA
tatcagtagtaaccgtaaggagg

SEQ ID NO: 922 - DNA, 23 bp, Artificial Sequence
  sgRNA
agtaaccgtaaggaggccgctgg

SEQ ID NO: 923 - DNA, 23 bp, Artificial Sequence
  sgRNA
aaccataatgtccatattgctgg

SEQ ID NO: 924 - DNA, 23 bp, Artificial Sequence
  sgRNA
accataatgtccatattgctggg

SEQ ID NO: 925 - DNA, 23 bp, Artificial Sequence
  sgRNA
ccataatgtccatattgctgggg

SEQ ID NO: 926 - DNA, 23 bp, Artificial Sequence
  sgRNA
ccatattgctggggatagtaagg

SEQ ID NO: 927 - DNA, 23 bp, Artificial Sequence
  sgRNA
taaggttcttgtctgtgttgcgg

SEQ ID NO: 928 - DNA, 23 bp, Artificial Sequence
  sgRNA
aaggttcttgtctgtgttgcggg

SEQ ID NO: 929 - DNA, 23 bp, Artificial Sequence
  sgRNA
ttgcgggtagttgttaccccagg

SEQ ID NO: 930 - DNA, 23 bp, Artificial Sequence
  sgRNA
ggatcgtccatgccactgattgg

SEQ ID NO: 931 - DNA, 23 bp, Artificial Sequence
  sgRNA
tgattggatcgattgtcacttgg

SEQ ID NO: 932 - DNA, 23 bp, Artificial Sequence
  sgRNA
agctgtactgcttaatgtttagg

SEQ ID NO: 933 - DNA, 23 bp, Artificial Sequence
  sgRNA
gggctatgtcaatccagctcagg

SEQ ID NO: 934 - DNA, 23 bp, Artificial Sequence
  sgRNA
cagctcaggccgaaccccgccgg

SEQ ID NO: 935 - DNA, 23 bp, Artificial Sequence
  sgRNA
ggcgagacactgagaagcccagg

SEQ ID NO: 936 - DNA, 23 bp, Artificial Sequence
  sgRNA
gacactgagaagcccaggagagg

SEQ ID NO: 937 - DNA, 23 bp, Artificial Sequence
  sgRNA
actgagaagcccaggagaggtgg

SEQ ID NO: 938 - DNA, 23 bp, Artificial Sequence
  sgRNA
agcccaggagaggtggcctctgg

SEQ ID NO: 939 - DNA, 23 bp, Artificial Sequence
  sgRNA
gcctctggtccactacaccgtgg

SEQ ID NO: 940 - DNA, 23 bp, Artificial Sequence
  sgRNA
ccgggttgccgtggcagcagcgg

SEQ ID NO: 941 - DNA, 23 bp, Artificial Sequence
  sgRNA
ggttgccgtggcagcagcggagg

SEQ ID NO: 942 - DNA, 23 bp, Artificial Sequence
  sgRNA
tgccgtggcagcagcggaggcgg

SEQ ID NO: 943 - DNA, 23 bp, Artificial Sequence
  sgRNA
gccgtggcagcagcggaggcggg

SEQ ID NO: 944 - DNA, 23 bp, Artificial Sequence
  sgRNA
agcggaggcgggcagcgcgcagg

SEQ ID NO: 945 - DNA, 23 bp, Artificial Sequence
  sgRNA
cagcgcgcaggcctgccatgagg

SEQ ID NO: 946 - DNA, 23 bp, Artificial Sequence
  sgRNA
agcgcgcaggcctgccatgaggg

SEQ ID NO: 947 - DNA, 23 bp, Artificial Sequence
  sgRNA
gcctgccatgagggaaagccagg

SEQ ID NO: 948 - DNA, 23 bp, Artificial Sequence
  sgRNA
agggaaagccaggatgccgccgg

SEQ ID NO: 949 - DNA, 23 bp, Artificial Sequence
  sgRNA
caggatgccgccggagctcatgg

SEQ ID NO: 950 - DNA, 23 bp, Artificial Sequence
  sgRNA
atgccgccggagctcatggctgg

SEQ ID NO: 951 - DNA, 23 bp, Artificial Sequence
  sgRNA
gctcatggctggaaccgcgtcgg

SEQ ID NO: 952 - DNA, 23 bp, Artificial Sequence
  sgRNA
ctggaaccgcgtcggctccacgg

SEQ ID NO: 953 - DNA, 23 bp, Artificial Sequence
  sgRNA
tcggctccacggccaccaagtgg

SEQ ID NO: 954 - DNA, 23 bp, Artificial Sequence
  sgRNA
acggccaccaagtggttcaccgg

SEQ ID NO: 955 - DNA, 23 bp, Artificial Sequence
  sgRNA
cggccaccaagtggttcaccggg

SEQ ID NO: 956 - DNA, 23 bp, Artificial Sequence
  sgRNA
ggccaccaagtggttcaccgggg

SEQ ID NO: 957 - DNA, 23 bp, Artificial Sequence
  sgRNA
tggttcaccggggcgcccttcgg

SEQ ID NO: 958 - DNA, 23 bp, Artificial Sequence
  sgRNA
ggttcaccggggcgcccttcggg

SEQ ID NO: 959 - DNA, 23 bp, Artificial Sequence
  sgRNA
gttcaccggggcgcccttcgggg

SEQ ID NO: 960 - DNA, 23 bp, Artificial Sequence
  sgRNA
atcaggctgttttgttggaaagg

SEQ ID NO: 961 - DNA, 23 bp, Artificial Sequence
  sgRNA
ggcctagaagtcatcaattttgg

SEQ ID NO: 962 - DNA, 23 bp, Artificial Sequence
  sgRNA
ttttggcctctcaccaatgtagg

SEQ ID NO: 963 - DNA, 23 bp, Artificial Sequence
  sgRNA
aaggatcacaccatttactaagg

SEQ ID NO: 964 - DNA, 23 bp, Artificial Sequence
  sgRNA
aggatcacaccatttactaaggg

SEQ ID NO: 965 - DNA, 23 bp, Artificial Sequence
  sgRNA
gggaaagtgccctccaactgtgg

SEQ ID NO: 966 - DNA, 23 bp, Artificial Sequence
  sgRNA
ctccttaaagccacatgcgaagg

SEQ ID NO: 967 - DNA, 23 bp, Artificial Sequence
  sgRNA
gcagtgaccagagagcccaaagg

SEQ ID NO: 968 - DNA, 23 bp, Artificial Sequence
  sgRNA
caaaggcctgaagacaaatctgg

SEQ ID NO: 969 - DNA, 23 bp, Artificial Sequence
  sgRNA
aaaggcctgaagacaaatctggg

SEQ ID NO: 970 - DNA, 23 bp, Artificial Sequence
  sgRNA
aaggcctgaagacaaatctgggg

SEQ ID NO: 971 - DNA, 23 bp, Artificial Sequence
  sgRNA
aggcctgaagacaaatctggggg

SEQ ID NO: 972 - DNA, 23 bp, Artificial Sequence
  sgRNA
caaatctgggggtgacagcatgg

SEQ ID NO: 973 - DNA, 23 bp, Artificial Sequence
  sgRNA
aaatctgggggtgacagcatggg

SEQ ID NO: 974 - DNA, 23 bp, Artificial Sequence
  sgRNA
tgggggtgacagcatgggcatgg

SEQ ID NO: 975 - DNA, 23 bp, Artificial Sequence
  sgRNA
gggggtgacagcatgggcatggg

SEQ ID NO: 976 - DNA, 23 bp, Artificial Sequence
  sgRNA
tgacagcatgggcatgggagtgg

SEQ ID NO: 977 - DNA, 23 bp, Artificial Sequence
  sgRNA
gacagcatgggcatgggagtggg

SEQ ID NO: 978 - DNA, 23 bp, Artificial Sequence
  sgRNA
acagcatgggcatgggagtgggg

SEQ ID NO: 979 - DNA, 23 bp, Artificial Sequence
  sgRNA
gagtggggtgtcttagagaaagg

SEQ ID NO: 980 - DNA, 23 bp, Artificial Sequence
  sgRNA
tgtcttagagaaaggacacatgg

SEQ ID NO: 981 - DNA, 23 bp, Artificial Sequence
  sgRNA
gtcttagagaaaggacacatggg

SEQ ID NO: 982 - DNA, 23 bp, Artificial Sequence
  sgRNA
agagaaaggacacatgggcttgg

SEQ ID NO: 983 - DNA, 23 bp, Artificial Sequence
  sgRNA
gagaaaggacacatgggcttggg

SEQ ID NO: 984 - DNA, 23 bp, Artificial Sequence
  sgRNA
aggacacatgggcttgggagagg

SEQ ID NO: 985 - DNA, 23 bp, Artificial Sequence
  sgRNA
ggacacatgggcttgggagaggg

SEQ ID NO: 986 - DNA, 23 bp, Artificial Sequence
  sgRNA
gacacatgggcttgggagagggg

SEQ ID NO: 987 - DNA, 23 bp, Artificial Sequence
  sgRNA
tgggagaggggagagatgtatgg

SEQ ID NO: 988 - DNA, 23 bp, Artificial Sequence
  sgRNA
gggagaggggagagatgtatggg

SEQ ID NO: 989 - DNA, 23 bp, Artificial Sequence
  sgRNA
ggagaggggagagatgtatgggg

SEQ ID NO: 990 - DNA, 23 bp, Artificial Sequence
  sgRNA
tgccagagctgcatacctgaagg

SEQ ID NO: 991 - DNA, 23 bp, Artificial Sequence
  sgRNA
ctgaaggtcacagtgtcttccgg

SEQ ID NO: 992 - DNA, 23 bp, Artificial Sequence
  sgRNA
tgaaggtcacagtgtcttccggg

SEQ ID NO: 993 - DNA, 23 bp, Artificial Sequence
  sgRNA
acagtgtcttccgggacagctgg

SEQ ID NO: 994 - DNA, 23 bp, Artificial Sequence
  sgRNA
cagtgtcttccgggacagctggg

SEQ ID NO: 995 - DNA, 23 bp, Artificial Sequence
  sgRNA
agtgtcttccgggacagctgggg

SEQ ID NO: 996 - DNA, 23 bp, Artificial Sequence
  sgRNA
cttccgggacagctggggacagg

SEQ ID NO: 997 - DNA, 23 bp, Artificial Sequence
  sgRNA
ggacaggtatcttttgttgcagg

SEQ ID NO: 998 - DNA, 23 bp, Artificial Sequence
  sgRNA
ctcagccagtgacatgaacatgg

SEQ ID NO: 999 - DNA, 23 bp, Artificial Sequence
  sgRNA
tcagccagtgacatgaacatggg

SEQ ID NO: 1000 - DNA, 23 bp, Artificial Sequence
  sgRNA
cagccagtgacatgaacatgggg

SEQ ID NO: 1001 - DNA, 23 bp, Artificial Sequence
  sgRNA
agccagtgacatgaacatggggg

SEQ ID NO: 1002 - DNA, 23 bp, Artificial Sequence
  sgRNA
catgggggccagagagcagatgg

SEQ ID NO: 1003 - DNA, 23 bp, Artificial Sequence
  sgRNA
ccagagagcagatggactgaagg

SEQ ID NO: 1004 - DNA, 23 bp, Artificial Sequence
  sgRNA
cagagagcagatggactgaaggg

SEQ ID NO: 1005 - DNA, 23 bp, Artificial Sequence
  sgRNA
gagcagatggactgaagggatgg

SEQ ID NO: 1006 - DNA, 23 bp, Artificial Sequence
  sgRNA
agcagatggactgaagggatggg

SEQ ID NO: 1007 - DNA, 23 bp, Artificial Sequence
  sgRNA
tgggacgtagttgacacttgtgg

SEQ ID NO: 1008 - DNA, 23 bp, Artificial Sequence
  sgRNA
gggacgtagttgacacttgtggg

SEQ ID NO: 1009 - DNA, 23 bp, Artificial Sequence
  sgRNA
tattctaaagccagagtgcttgg

SEQ ID NO: 1010 - DNA, 23 bp, Artificial Sequence
  sgRNA
gtttattaaagttcagaaagtgg

SEQ ID NO: 1011 - DNA, 23 bp, Artificial Sequence
  sgRNA
tgggccgctacctcaacacctgg

SEQ ID NO: 1012 - DNA, 23 bp, Artificial Sequence
  sgRNA
ctacctcaacacctggctgatgg

SEQ ID NO: 1013 - DNA, 23 bp, Artificial Sequence
  sgRNA
cacctggctgatggagacaaagg

SEQ ID NO: 1014 - DNA, 23 bp, Artificial Sequence
  sgRNA
ggctgatggagacaaaggacagg

SEQ ID NO: 1015 - DNA, 23 bp, Artificial Sequence
  sgRNA
tgatggagacaaaggacaggcgg

SEQ ID NO: 1016 - DNA, 23 bp, Artificial Sequence
  sgRNA
tatcgatccctattcctgagtgg

SEQ ID NO: 1017 - DNA, 23 bp, Artificial Sequence
  sgRNA
caaacgctacctctcagacctgg

SEQ ID NO: 1018 - DNA, 23 bp, Artificial Sequence
  sgRNA
gctacctctcagacctggcccgg

SEQ ID NO: 1019 - DNA, 23 bp, Artificial Sequence
  sgRNA
ctacctctcagacctggcccggg

SEQ ID NO: 1020 - DNA, 23 bp, Artificial Sequence
  sgRNA
aagcgaccttgagacatatgtgg

SEQ ID NO: 1021 - DNA, 23 bp, Artificial Sequence
  sgRNA
acatatgtggcacgatccgtcgg

SEQ ID NO: 1022 - DNA, 23 bp, Artificial Sequence
  sgRNA
gcacgatccgtcggcacccgcgg

SEQ ID NO: 1023 - DNA, 23 bp, Artificial Sequence
  sgRNA
ggcccctatgacactttctctgg

SEQ ID NO: 1024 - DNA, 23 bp, Artificial Sequence
  sgRNA
atgacactttctctggtgatcgg

SEQ ID NO: 1025 - DNA, 23 bp, Artificial Sequence
  sgRNA
cggagcaagccactgccttatgg

SEQ ID NO: 1026 - DNA, 23 bp, Artificial Sequence
  sgRNA
ggagcaagccactgccttatggg

SEQ ID NO: 1027 - DNA, 23 bp, Artificial Sequence
  sgRNA
gcctgccatgagggaaagccagg

SEQ ID NO: 1028 - DNA, 23 bp, Artificial Sequence
  sgRNA
agggaaagccaggatgccgccgg

SEQ ID NO: 1029 - DNA, 23 bp, Artificial Sequence
  sgRNA
caggatgccgccggagctcatgg

SEQ ID NO: 1030 - DNA, 23 bp, Artificial Sequence
  sgRNA
atgccgccggagctcatggctgg

SEQ ID NO: 1031 - DNA, 23 bp, Artificial Sequence
  sgRNA
gctcatggctggaaccgcgtcgg

SEQ ID NO: 1032 - DNA, 23 bp, Artificial Sequence
  sgRNA
ctggaaccgcgtcggctccacgg

SEQ ID NO: 1033 - DNA, 23 bp, Artificial Sequence
  sgRNA
tcggctccacggccaccaagtgg

SEQ ID NO: 1034 - DNA, 23 bp, Artificial Sequence
  sgRNA
acggccaccaagtggttcaccgg

SEQ ID NO: 1035 - DNA, 23 bp, Artificial Sequence
  sgRNA
cggccaccaagtggttcaccggg

SEQ ID NO: 1036 - DNA, 23 bp, Artificial Sequence
  sgRNA
ggccaccaagtggttcaccgggg

SEQ ID NO: 1037 - DNA, 23 bp, Artificial Sequence
  sgRNA
tggttcaccggggcgcccttcgg

SEQ ID NO: 1038 - DNA, 23 bp, Artificial Sequence
  sgRNA
ggttcaccggggcgcccttcggg

SEQ ID NO: 1039 - DNA, 23 bp, Artificial Sequence
  sgRNA
gttcaccggggcgcccttcgggg

SEQ ID NO: 1040 - DNA, 23 bp, Artificial Sequence
  sgRNA
ccacatctggccccagtttctgg

SEQ ID NO: 1041 - DNA, 23 bp, Artificial Sequence
  sgRNA
cccattcctgttgacctccaagg

SEQ ID NO: 1042 - DNA, 23 bp, Artificial Sequence
  sgRNA
ccattcctgttgacctccaaggg

SEQ ID NO: 1043 - DNA, 23 bp, Artificial Sequence
  sgRNA
cattcctgttgacctccaagggg

SEQ ID NO: 1044 - DNA, 23 bp, Artificial Sequence
  sgRNA
ctgttgacctccaaggggtcagg

SEQ ID NO: 1045 - DNA, 23 bp, Artificial Sequence
  sgRNA
ctccaaggggtcaggtgcaaagg

SEQ ID NO: 1046 - DNA, 23 bp, Artificial Sequence
  sgRNA
aaaggcctgccagatgattatgg

SEQ ID NO: 1047 - DNA, 23 bp, Artificial Sequence
  sgRNA
aaggcctgccagatgattatggg

SEQ ID NO: 1048 - DNA, 23 bp, Artificial Sequence
  sgRNA
gccagatgattatgggaagctgg

SEQ ID NO: 1049 - DNA, 23 bp, Artificial Sequence
  sgRNA
cagcaagaagaagctgatgaagg

SEQ ID NO: 1050 - DNA, 23 bp, Artificial Sequence
  sgRNA
caagaagaagctgatgaaggagg

SEQ ID NO: 1051 - DNA, 23 bp, Artificial Sequence
  sgRNA
gaagaagctgatgaaggaggtgg

SEQ ID NO: 1052 - DNA, 23 bp, Artificial Sequence
  sgRNA
ctgatgaaggaggtggacacagg

SEQ ID NO: 1053 - DNA, 23 bp, Artificial Sequence
  sgRNA
tgaaggaggtggacacaggctgg

SEQ ID NO: 1054 - DNA, 23 bp, Artificial Sequence
  sgRNA
gaaggaggtggacacaggctggg

SEQ ID NO: 1055 - DNA, 23 bp, Artificial Sequence
  sgRNA
ggtggacacaggctgggccaagg

SEQ ID NO: 1056 - DNA, 23 bp, Artificial Sequence
  sgRNA
cacaggctgggccaaggcccagg

SEQ ID NO: 1057 - DNA, 23 bp, Artificial Sequence
  sgRNA
ccaaggcccaggaagccacgcgg

SEQ ID NO: 1058 - DNA, 23 bp, Artificial Sequence
  sgRNA
gctaccccacttccagtaccagg

SEQ ID NO: 1059 - DNA, 23 bp, Artificial Sequence
  sgRNA
aggccatcatgaaagagaagcgg

SEQ ID NO: 1060 - DNA, 23 bp, Artificial Sequence
  sgRNA
tatccaggccctggaaattatgg

SEQ ID NO: 1061 - DNA, 23 bp, Artificial Sequence
  sgRNA
atccaggccctggaaattatggg

SEQ ID NO: 1062 - DNA, 23 bp, Artificial Sequence
  sgRNA
tccaggccctggaaattatgggg

SEQ ID NO: 1063 - DNA, 23 bp, Artificial Sequence
  sgRNA
ccctggaaattatggggagaagg

SEQ ID NO: 1064 - DNA, 23 bp, Artificial Sequence
  sgRNA
cctggaaattatggggagaaggg

SEQ ID NO: 1065 - DNA, 23 bp, Artificial Sequence
  sgRNA
gggtaacccatacaccaagctgg

SEQ ID NO: 1066 - DNA, 23 bp, Artificial Sequence
  sgRNA
taacccatacaccaagctggagg

SEQ ID NO: 1067 - DNA, 23 bp, Artificial Sequence
  sgRNA
ccaagctggaggagaatgcctgg

SEQ ID NO: 1068 - DNA, 23 bp, Artificial Sequence
  sgRNA
tggaggagaatgcctggaaccgg

SEQ ID NO: 1069 - DNA, 23 bp, Artificial Sequence
  sgRNA
ctggaaccggtctcattccgagg

SEQ ID NO: 1070 - DNA, 23 bp, Artificial Sequence
  sgRNA
tggaaccggtctcattccgaggg

SEQ ID NO: 1071 - DNA, 23 bp, Artificial Sequence
  sgRNA
attccgagggcctcatgtgcagg

SEQ ID NO: 1072 - DNA, 23 bp, Artificial Sequence
  sgRNA
tgagcaacaagccacacccccgg

SEQ ID NO: 1073 - DNA, 23 bp, Artificial Sequence
  sgRNA
aagacttcttagaacagctgcgg

SEQ ID NO: 1074 - DNA, 23 bp, Artificial Sequence
  sgRNA
agacttcttagaacagctgcggg

SEQ ID NO: 1075 - DNA, 23 bp, Artificial Sequence
  sgRNA
gggagaaaccatgtagcacccgg

SEQ ID NO: 1076 - DNA, 23 bp, Artificial Sequence
  sgRNA
ggagaaaccatgtagcacccggg

SEQ ID NO: 1077 - DNA, 23 bp, Artificial Sequence
  sgRNA
gagaaaccatgtagcacccgggg

SEQ ID NO: 1078 - DNA, 23 bp, Artificial Sequence
  sgRNA
agaaaccatgtagcacccggggg

SEQ ID NO: 1079 - DNA, 23 bp, Artificial Sequence
  sgRNA
acccgggggctgctcagctctgg

SEQ ID NO: 1080 - DNA, 23 bp, Artificial Sequence
  sgRNA
cccgggggctgctcagctctggg

SEQ ID NO: 1081 - DNA, 23 bp, Artificial Sequence
  sgRNA
ccgggggctgctcagctctgggg

SEQ ID NO: 1082 - DNA, 23 bp, Artificial Sequence
  sgRNA
ggggctgctcagctctggggagg

SEQ ID NO: 1083 - DNA, 23 bp, Artificial Sequence
  sgRNA
tctggggaggttcgcttccgagg

SEQ ID NO: 1084 - DNA, 23 bp, Artificial Sequence
  sgRNA
gttcgcttccgaggactcactgg

SEQ ID NO: 1085 - DNA, 23 bp, Artificial Sequence
  sgRNA
ttcgcttccgaggactcactggg

SEQ ID NO: 1086 - DNA, 23 bp, Artificial Sequence
  sgRNA
tcacatcacaataagaagcatgg

SEQ ID NO: 1087 - DNA, 23 bp, Artificial Sequence
  sgRNA
cacatcacaataagaagcatggg

SEQ ID NO: 1088 - DNA, 23 bp, Artificial Sequence
  sgRNA
acatcacaataagaagcatgggg

SEQ ID NO: 1089 - DNA, 23 bp, Artificial Sequence
  sgRNA
acccgaaaacccctacagagagg

SEQ ID NO: 1090 - DNA, 23 bp, Artificial Sequence
  sgRNA
cccctacagagaggatttactgg

SEQ ID NO: 1091 - DNA, 23 bp, Artificial Sequence
  sgRNA
ccctacagagaggatttactggg

SEQ ID NO: 1092 - DNA, 23 bp, Artificial Sequence
  sgRNA
tctctgctgtttatcccaactgg

SEQ ID NO: 1093 - DNA, 23 bp, Artificial Sequence
  sgRNA
gaagttcagcaccttcactgagg

SEQ ID NO: 1094 - DNA, 23 bp, Artificial Sequence
  sgRNA
aaggatcacaccatttactaagg

SEQ ID NO: 1095 - DNA, 23 bp, Artificial Sequence
  sgRNA
aggatcacaccatttactaaggg

SEQ ID NO: 1096 - DNA, 23 bp, Artificial Sequence
  sgRNA
gggaaagtgccctccaactgtgg

SEQ ID NO: 1097 - DNA, 23 bp, Artificial Sequence
  sgRNA
ctccttaaagccacatgcgaagg

SEQ ID NO: 1098 - DNA, 23 bp, Artificial Sequence
  sgRNA
gcagtgaccagagagcccaaagg

SEQ ID NO: 1099 - DNA, 23 bp, Artificial Sequence
  sgRNA
caaaggcctgaagacaaatctgg

SEQ ID NO: 1100 - DNA, 23 bp, Artificial Sequence
  sgRNA
aaaggcctgaagacaaatctggg

SEQ ID NO: 1101 - DNA, 23 bp, Artificial Sequence
  sgRNA
aaggcctgaagacaaatctgggg

SEQ ID NO: 1102 - DNA, 23 bp, Artificial Sequence
  sgRNA
aggcctgaagacaaatctggggg

SEQ ID NO: 1103 - DNA, 23 bp, Artificial Sequence
  sgRNA
caaatctgggggtgacagcatgg

SEQ ID NO: 1104 - DNA, 23 bp, Artificial Sequence
  sgRNA
aaatctgggggtgacagcatggg

SEQ ID NO: 1105 - DNA, 23 bp, Artificial Sequence
  sgRNA
tgggggtgacagcatgggcatgg

SEQ ID NO: 1106 - DNA, 23 bp, Artificial Sequence
  sgRNA
gggggtgacagcatgggcatggg

SEQ ID NO: 1107 - DNA, 23 bp, Artificial Sequence
  sgRNA
tgacagcatgggcatgggagtgg

SEQ ID NO: 1108 - DNA, 23 bp, Artificial Sequence
  sgRNA
gacagcatgggcatgggagtggg

SEQ ID NO: 1109 - DNA, 23 bp, Artificial Sequence
  sgRNA
acagcatgggcatgggagtgggg

SEQ ID NO: 1110 - DNA, 23 bp, Artificial Sequence
  sgRNA
gagtggggtgtcttagagaaagg

SEQ ID NO: 1111 - DNA, 23 bp, Artificial Sequence
  sgRNA
tgtcttagagaaaggacacatgg

SEQ ID NO: 1112 - DNA, 23 bp, Artificial Sequence
  sgRNA
gtcttagagaaaggacacatggg

SEQ ID NO: 1113 - DNA, 23 bp, Artificial Sequence
  sgRNA
agagaaaggacacatgggcttgg

SEQ ID NO: 1114 - DNA, 23 bp, Artificial Sequence
  sgRNA
gagaaaggacacatgggcttggg

SEQ ID NO: 1115 - DNA, 23 bp, Artificial Sequence
  sgRNA
aggacacatgggcttgggagagg

SEQ ID NO: 1116 - DNA, 23 bp, Artificial Sequence
  sgRNA
ggacacatgggcttgggagaggg

SEQ ID NO: 1117 - DNA, 23 bp, Artificial Sequence
  sgRNA
gacacatgggcttgggagagggg

SEQ ID NO: 1118 - DNA, 23 bp, Artificial Sequence
  sgRNA
tgggagaggggagagatgtatgg

SEQ ID NO: 1119 - DNA, 23 bp, Artificial Sequence
  sgRNA
gggagaggggagagatgtatggg

SEQ ID NO: 1120 - DNA, 23 bp, Artificial Sequence
  sgRNA
ggagaggggagagatgtatgggg

SEQ ID NO: 1121 - DNA, 23 bp, Artificial Sequence
  sgRNA
tgccagagctgcatacctgaagg

SEQ ID NO: 1122 - DNA, 23 bp, Artificial Sequence
  sgRNA
ctgaaggtcacagtgtcttccgg

SEQ ID NO: 1123 - DNA, 23 bp, Artificial Sequence
  sgRNA
tgaaggtcacagtgtcttccggg

SEQ ID NO: 1124 - DNA, 23 bp, Artificial Sequence
  sgRNA
acagtgtcttccgggacagctgg

SEQ ID NO: 1125 - DNA, 23 bp, Artificial Sequence
  sgRNA
cagtgtcttccgggacagctggg

SEQ ID NO: 1126 - DNA, 23 bp, Artificial Sequence
  sgRNA
agtgtcttccgggacagctgggg

SEQ ID NO: 1127 - DNA, 23 bp, Artificial Sequence
  sgRNA
cttccgggacagctggggacagg

SEQ ID NO: 1128 - DNA, 23 bp, Artificial Sequence
  sgRNA
ggacaggtatcttttgttgcagg

SEQ ID NO: 1129 - DNA, 23 bp, Artificial Sequence
  sgRNA
ctcagccagtgacatgaacatgg

SEQ ID NO: 1130 - DNA, 23 bp, Artificial Sequence
  sgRNA
tcagccagtgacatgaacatggg

SEQ ID NO: 1131 - DNA, 23 bp, Artificial Sequence
  sgRNA
cagccagtgacatgaacatgggg

SEQ ID NO: 1132 - DNA, 23 bp, Artificial Sequence
  sgRNA
agccagtgacatgaacatggggg

SEQ ID NO: 1133 - DNA, 23 bp, Artificial Sequence
  sgRNA
catgggggccagagagcagatgg

SEQ ID NO: 1134 - DNA, 23 bp, Artificial Sequence
  sgRNA
ccagagagcagatggactgaagg

SEQ ID NO: 1135 - DNA, 23 bp, Artificial Sequence
  sgRNA
cagagagcagatggactgaaggg

SEQ ID NO: 1136 - DNA, 23 bp, Artificial Sequence
  sgRNA
gagcagatggactgaagggatgg

SEQ ID NO: 1137 - DNA, 23 bp, Artificial Sequence
  sgRNA
agcagatggactgaagggatggg

SEQ ID NO: 1138 - DNA, 23 bp, Artificial Sequence
  sgRNA
tgggacgtagttgacacttgtgg

SEQ ID NO: 1139 - DNA, 23 bp, Artificial Sequence
  sgRNA
gggacgtagttgacacttgtggg

SEQ ID NO: 1140 - DNA, 23 bp, Artificial Sequence
  sgRNA
tattctaaagccagagtgcttgg

SEQ ID NO: 1141 - DNA, 23 bp, Artificial Sequence
  sgRNA
gtttattaaagttcagaaagtgg

SEQ ID NO: 1142 - DNA, 23 bp, Artificial Sequence
  sgRNA
ctgtggctctgcaccccgaaggg

SEQ ID NO: 1143 - DNA, 23 bp, Artificial Sequence
  sgRNA
ctgcaccccgaagggcgccccgg

SEQ ID NO: 1144 - DNA, 23 bp, Artificial Sequence
  sgRNA
gggcgccccggtgaaccacttgg

SEQ ID NO: 1145 - DNA, 23 bp, Artificial Sequence
  sgRNA
cgccccggtgaaccacttggtgg

SEQ ID NO: 1146 - DNA, 23 bp, Artificial Sequence
  sgRNA
ggtgaaccacttggtggccgtgg

SEQ ID NO: 1147 - DNA, 23 bp, Artificial Sequence
  sgRNA
tggtggccgtggagccgacgcgg

SEQ ID NO: 1148 - DNA, 23 bp, Artificial Sequence
  sgRNA
gcggttccagccatgagctccgg

SEQ ID NO: 1149 - DNA, 23 bp, Artificial Sequence
  sgRNA
gttccagccatgagctccggcgg

SEQ ID NO: 1150 - DNA, 23 bp, Artificial Sequence
  sgRNA
catgagctccggcggcatcctgg

SEQ ID NO: 1151 - DNA, 23 bp, Artificial Sequence
  sgRNA
ggcatcctggctttccctcatgg

SEQ ID NO: 1152 - DNA, 23 bp, Artificial Sequence
  sgRNA
tcctggctttccctcatggcagg

SEQ ID NO: 1153 - DNA, 23 bp, Artificial Sequence
  sgRNA
gcccgcctccgctgctgccacgg

SEQ ID NO: 1154 - DNA, 23 bp, Artificial Sequence
  sgRNA
ccgctgctgccacggcaacccgg

SEQ ID NO: 1155 - DNA, 23 bp, Artificial Sequence
  sgRNA
cgctgctgccacggcaacccggg

SEQ ID NO: 1156 - DNA, 23 bp, Artificial Sequence
  sgRNA
cttcacaggagatcctacattgg

SEQ ID NO: 1157 - DNA, 23 bp, Artificial Sequence
  sgRNA
ggagatcctacattggtgagagg

SEQ ID NO: 1158 - DNA, 23 bp, Artificial Sequence
  sgRNA
ggccaaaattgatgacttctagg

SEQ ID NO: 1159 - DNA, 23 bp, Artificial Sequence
  sgRNA
tttctgaactttaataaacaagg

SEQ ID NO: 1160 - DNA, 23 bp, Artificial Sequence
  sgRNA
aaacaaggagccaagcactctgg

SEQ ID NO: 1161 - DNA, 23 bp, Artificial Sequence
  sgRNA
actctggctttagaatagaaagg

SEQ ID NO: 1162 - DNA, 23 bp, Artificial Sequence
  sgRNA
ctctggctttagaatagaaaggg

SEQ ID NO: 1163 - DNA, 23 bp, Artificial Sequence
  sgRNA
ccttcagtccatctgctctctgg

SEQ ID NO: 1164 - DNA, 23 bp, Artificial Sequence
  sgRNA
ggcccccatgttcatgtcactgg

SEQ ID NO: 1165 - DNA, 23 bp, Artificial Sequence
  sgRNA
actggctgagttgagttctcagg

SEQ ID NO: 1166 - DNA, 23 bp, Artificial Sequence
  sgRNA
atacctgtccccagctgtcccgg

SEQ ID NO: 1167 - DNA, 23 bp, Artificial Sequence
  sgRNA
cggaagacactgtgaccttcagg

SEQ ID NO: 1168 - DNA, 23 bp, Artificial Sequence
  sgRNA
gaccttcaggtatgcagctctgg

SEQ ID NO: 1169 - DNA, 23 bp, Artificial Sequence
  sgRNA
caggtatgcagctctggcaaagg

SEQ ID NO: 1170 - DNA, 23 bp, Artificial Sequence
  sgRNA
tcacccccagatttgtcttcagg

SEQ ID NO: 1171 - DNA, 23 bp, Artificial Sequence
  sgRNA
cagatttgtcttcaggcctttgg

SEQ ID NO: 1172 - DNA, 23 bp, Artificial Sequence
  sgRNA
agatttgtcttcaggcctttggg

SEQ ID NO: 1173 - DNA, 23 bp, Artificial Sequence
  sgRNA
cttcaggcctttgggctctctgg

SEQ ID NO: 1174 - DNA, 23 bp, Artificial Sequence
  sgRNA
ttgggctctctggtcactgcagg

SEQ ID NO: 1175 - DNA, 23 bp, Artificial Sequence
  sgRNA
tgcaggctgtccttcgcatgtgg

SEQ ID NO: 1176 - DNA, 23 bp, Artificial Sequence
  sgRNA
gtccttcgcatgtggctttaagg

SEQ ID NO: 1177 - DNA, 23 bp, Artificial Sequence
  sgRNA
cgcatgtggctttaaggagtagg

SEQ ID NO: 1178 - DNA, 23 bp, Artificial Sequence
  sgRNA
tctgaattgtaatccacagttgg

SEQ ID NO: 1179 - DNA, 23 bp, Artificial Sequence
  sgRNA
gaattgtaatccacagttggagg

SEQ ID NO: 1180 - DNA, 23 bp, Artificial Sequence
  sgRNA
aattgtaatccacagttggaggg

SEQ ID NO: 1181 - DNA, 23 bp, Artificial Sequence
  sgRNA
gggcactttcccttagtaaatgg

SEQ ID NO: 1182 - DNA, 23 bp, Artificial Sequence
  sgRNA
gcatgagcatgtcccgggccagg

SEQ ID NO: 1183 - DNA, 23 bp, Artificial Sequence
  sgRNA
tgtcccgggccaggtctgagagg

SEQ ID NO: 1184 - DNA, 23 bp, Artificial Sequence
  sgRNA
caggtctgagaggtagcgtttgg

SEQ ID NO: 1185 - DNA, 23 bp, Artificial Sequence
  sgRNA
ggtagcgtttggatccactcagg

SEQ ID NO: 1186 - DNA, 23 bp, Artificial Sequence
  sgRNA
gtttggatccactcaggaatagg

SEQ ID NO: 1187 - DNA, 23 bp, Artificial Sequence
  sgRNA
tttggatccactcaggaataggg

SEQ ID NO: 1188 - DNA, 23 bp, Artificial Sequence
  sgRNA
gtcctttgtctccatcagccagg

SEQ ID NO: 1189 - DNA, 23 bp, Artificial Sequence
  sgRNA
tctccatcagccaggtgttgagg

SEQ ID NO: 1190 - DNA, 23 bp, Artificial Sequence
  sgRNA
tcagccaggtgttgaggtagcgg

SEQ ID NO: 1191 - DNA, 23 bp, Artificial Sequence
  sgRNA
aggtagcggcccacacctactgg

SEQ ID NO: 1192 - DNA, 23 bp, Artificial Sequence
  sgRNA
ggtagcggcccacacctactggg

SEQ ID NO: 1193 - DNA, 23 bp, Artificial Sequence
  sgRNA
tgcatggagtagtgcccataagg

SEQ ID NO: 1194 - DNA, 23 bp, Artificial Sequence
  sgRNA
gagtagtgcccataaggcagtgg

SEQ ID NO: 1195 - DNA, 23 bp, Artificial Sequence
  sgRNA
atcaccagagaaagtgtcatagg

SEQ ID NO: 1196 - DNA, 23 bp, Artificial Sequence
  sgRNA
tcaccagagaaagtgtcataggg

SEQ ID NO: 1197 - DNA, 23 bp, Artificial Sequence
  sgRNA
caccagagaaagtgtcatagggg

SEQ ID NO: 1198 - DNA, 23 bp, Artificial Sequence
  sgRNA
agaaagtgtcataggggccgcgg

SEQ ID NO: 1199 - DNA, 23 bp, Artificial Sequence
  sgRNA
gaaagtgtcataggggccgcggg

SEQ ID NO: 1200 - DNA, 23 bp, Artificial Sequence
  sgRNA
ataggggccgcgggtgccgacgg

SEQ ID NO: 1201 - DNA, 23 bp, Artificial Sequence
  sgRNA
atcgtgccacatatgtctcaagg

SEQ ID NO: 1202 - DNA, 23 bp, Artificial Sequence
  sgRNA
aaggtcgcttttgaagaagtagg

SEQ ID NO: 1203 - DNA, 23 bp, Artificial Sequence
  sgRNA
gcttttgaagaagtaggtgccgg

SEQ ID NO: 1204 - DNA, 23 bp, Artificial Sequence
  sgRNA
cttttgaagaagtaggtgccggg

SEQ ID NO: 1205 - DNA, 23 bp, Artificial Sequence
  sgRNA
ctgtggctctgcaccccgaaggg

SEQ ID NO: 1206 - DNA, 23 bp, Artificial Sequence
  sgRNA
ctgcaccccgaagggcgccccgg

SEQ ID NO: 1207 - DNA, 23 bp, Artificial Sequence
  sgRNA
gggcgccccggtgaaccacttgg

SEQ ID NO: 1208 - DNA, 23 bp, Artificial Sequence
  sgRNA
cgccccggtgaaccacttggtgg

SEQ ID NO: 1209 - DNA, 23 bp, Artificial Sequence
  sgRNA
ggtgaaccacttggtggccgtgg

SEQ ID NO: 1210 - DNA, 23 bp, Artificial Sequence
  sgRNA
tggtggccgtggagccgacgcgg

SEQ ID NO: 1211 - DNA, 23 bp, Artificial Sequence
  sgRNA
gcggttccagccatgagctccgg

SEQ ID NO: 1212 - DNA, 23 bp, Artificial Sequence
  sgRNA
gttccagccatgagctccggcgg

SEQ ID NO: 1213 - DNA, 23 bp, Artificial Sequence
  sgRNA
catgagctccggcggcatcctgg

SEQ ID NO: 1214 - DNA, 23 bp, Artificial Sequence
  sgRNA
ggcatcctggctttccctcatgg

SEQ ID NO: 1215 - DNA, 23 bp, Artificial Sequence
  sgRNA
tcctggctttccctcatggcagg

SEQ ID NO: 1216 - DNA, 23 bp, Artificial Sequence
  sgRNA
gcttcccataatcatctggcagg

SEQ ID NO: 1217 - DNA, 23 bp, Artificial Sequence
  sgRNA
ggcctttgcacctgaccccttgg

SEQ ID NO: 1218 - DNA, 23 bp, Artificial Sequence
  sgRNA
ctttgcacctgaccccttggagg

SEQ ID NO: 1219 - DNA, 23 bp, Artificial Sequence
  sgRNA
ctgaccccttggaggtcaacagg

SEQ ID NO: 1220 - DNA, 23 bp, Artificial Sequence
  sgRNA
cccttggaggtcaacaggaatgg

SEQ ID NO: 1221 - DNA, 23 bp, Artificial Sequence
  sgRNA
ccttggaggtcaacaggaatggg

SEQ ID NO: 1222 - DNA, 23 bp, Artificial Sequence
  sgRNA
cttggaggtcaacaggaatgggg

SEQ ID NO: 1223 - DNA, 23 bp, Artificial Sequence
  sgRNA
ttggaggtcaacaggaatggggg

SEQ ID NO: 1224 - DNA, 23 bp, Artificial Sequence
  sgRNA
aggtcaacaggaatgggggctgg

SEQ ID NO: 1225 - DNA, 23 bp, Artificial Sequence
  sgRNA
caggaatgggggctggttgacgg

SEQ ID NO: 1226 - DNA, 23 bp, Artificial Sequence
  sgRNA
aggaatgggggctggttgacggg

SEQ ID NO: 1227 - DNA, 23 bp, Artificial Sequence
  sgRNA
ggtttgcatttcttctcttgtgg

SEQ ID NO: 1228 - DNA, 23 bp, Artificial Sequence
  sgRNA
ctcttgtggaagccagaaactgg

SEQ ID NO: 1229 - DNA, 23 bp, Artificial Sequence
  sgRNA
tcttgtggaagccagaaactggg

SEQ ID NO: 1230 - DNA, 23 bp, Artificial Sequence
  sgRNA
cttgtggaagccagaaactgggg

SEQ ID NO: 1231 - DNA, 23 bp, Artificial Sequence
  sgRNA
ccagaaactggggccagatgtgg

SEQ ID NO: 1232 - DNA, 23 bp, Artificial Sequence
  sgRNA
cagccgcttctctttcatgatgg

SEQ ID NO: 1233 - DNA, 23 bp, Artificial Sequence
  sgRNA
gcttctctttcatgatggcctgg

SEQ ID NO: 1234 - DNA, 23 bp, Artificial Sequence
  sgRNA
ctttcatgatggcctggtactgg

SEQ ID NO: 1235 - DNA, 23 bp, Artificial Sequence
  sgRNA
tgatggcctggtactggaagtgg

SEQ ID NO: 1236 - DNA, 23 bp, Artificial Sequence
  sgRNA
gatggcctggtactggaagtggg

SEQ ID NO: 1237 - DNA, 23 bp, Artificial Sequence
  sgRNA
atggcctggtactggaagtgggg

SEQ ID NO: 1238 - DNA, 23 bp, Artificial Sequence
  sgRNA
ggtactggaagtggggtagctgg

SEQ ID NO: 1239 - DNA, 23 bp, Artificial Sequence
  sgRNA
gtactggaagtggggtagctggg

SEQ ID NO: 1240 - DNA, 23 bp, Artificial Sequence
  sgRNA
gggtagctgggtcagccgcgtgg

SEQ ID NO: 1241 - DNA, 23 bp, Artificial Sequence
  sgRNA
gggtcagccgcgtggcttcctgg

SEQ ID NO: 1242 - DNA, 23 bp, Artificial Sequence
  sgRNA
ggtcagccgcgtggcttcctggg

SEQ ID NO: 1243 - DNA, 23 bp, Artificial Sequence
  sgRNA
ccgcgtggcttcctgggccttgg

SEQ ID NO: 1244 - DNA, 23 bp, Artificial Sequence
  sgRNA
cagcttcttcttgctgaagcagg

SEQ ID NO: 1245 - DNA, 23 bp, Artificial Sequence
  sgRNA
cttgctgaagcaggtctctttgg

SEQ ID NO: 1246 - DNA, 23 bp, Artificial Sequence
  sgRNA
tctttggagctgtaagtcccagg

SEQ ID NO: 1247 - DNA, 23 bp, Artificial Sequence
  sgRNA
ctttggagctgtaagtcccaggg

SEQ ID NO: 1248 - DNA, 23 bp, Artificial Sequence
  sgRNA
tgtaagtcccagggcctatgtgg

SEQ ID NO: 1249 - DNA, 23 bp, Artificial Sequence
  sgRNA
gtaagtcccagggcctatgtggg

SEQ ID NO: 1250 - DNA, 23 bp, Artificial Sequence
  sgRNA
tgttgctcatcctgcacatgagg

SEQ ID NO: 1251 - DNA, 23 bp, Artificial Sequence
  sgRNA
catcctgcacatgaggccctcgg

SEQ ID NO: 1252 - DNA, 23 bp, Artificial Sequence
  sgRNA
tgaggccctcggaatgagaccgg

SEQ ID NO: 1253 - DNA, 23 bp, Artificial Sequence
  sgRNA
ctcggaatgagaccggttccagg

SEQ ID NO: 1254 - DNA, 23 bp, Artificial Sequence
  sgRNA
ccaggcattctcctccagcttgg

SEQ ID NO: 1255 - DNA, 23 bp, Artificial Sequence
  sgRNA
ttctcctccagcttggtgtatgg

SEQ ID NO: 1256 - DNA, 23 bp, Artificial Sequence
  sgRNA
tctcctccagcttggtgtatggg

SEQ ID NO: 1257 - DNA, 23 bp, Artificial Sequence
  sgRNA
cccttctccccataatttccagg

SEQ ID NO: 1258 - DNA, 23 bp, Artificial Sequence
  sgRNA
ccttctccccataatttccaggg

SEQ ID NO: 1259 - DNA, 23 bp, Artificial Sequence
  sgRNA
tccccataatttccagggcctgg

SEQ ID NO: 1260 - DNA, 23 bp, Artificial Sequence
  sgRNA
ccccagagctgagcagcccccgg

SEQ ID NO: 1261 - DNA, 23 bp, Artificial Sequence
  sgRNA
cccagagctgagcagcccccggg

SEQ ID NO: 1262 - DNA, 23 bp, Artificial Sequence
  sgRNA
agcagcccccgggtgctacatgg

SEQ ID NO: 1263 - DNA, 23 bp, Artificial Sequence
  sgRNA
gctgttctaagaagtctttgagg

SEQ ID NO: 1264 - DNA, 23 bp, Artificial Sequence
  sgRNA
taagaagtctttgaggttgtagg

SEQ ID NO: 1265 - DNA, 23 bp, Artificial Sequence
  sgRNA
gtctttgaggttgtaggagccgg

SEQ ID NO: 1266 - DNA, 23 bp, Artificial Sequence
  sgRNA
tctttgaggttgtaggagccggg

SEQ ID NO: 1267 - DNA, 23 bp, Artificial Sequence
  sgRNA
ctttgaggttgtaggagccgggg

SEQ ID NO: 1268 - DNA, 23 bp, Artificial Sequence
  sgRNA
gtgtgcgggggcactggctgagg

SEQ ID NO: 1269 - DNA, 23 bp, Artificial Sequence
  sgRNA
gcgggggcactggctgaggttgg

SEQ ID NO: 1270 - DNA, 23 bp, Artificial Sequence
  sgRNA
gcccagtaaatcctctctgtagg

SEQ ID NO: 1271 - DNA, 23 bp, Artificial Sequence
  sgRNA
cccagtaaatcctctctgtaggg

SEQ ID NO: 1272 - DNA, 23 bp, Artificial Sequence
  sgRNA
ccagtaaatcctctctgtagggg

SEQ ID NO: 1273 - DNA, 23 bp, Artificial Sequence
  sgRNA
atcctctctgtaggggttttcgg

SEQ ID NO: 1274 - DNA, 23 bp, Artificial Sequence
  sgRNA
tcctctctgtaggggttttcggg

SEQ ID NO: 1275 - DNA, 23 bp, Artificial Sequence
  sgRNA
ctgtaggggttttcgggtttcgg

SEQ ID NO: 1276 - DNA, 23 bp, Artificial Sequence
  sgRNA
tgtaggggttttcgggtttcggg

SEQ ID NO: 1277 - DNA, 23 bp, Artificial Sequence
  sgRNA
gtaggggttttcgggtttcgggg

SEQ ID NO: 1278 - DNA, 23 bp, Artificial Sequence
  sgRNA
cttgaaattcatcagttccctgg

SEQ ID NO: 1279 - DNA, 23 bp, Artificial Sequence
  sgRNA
ttgaaattcatcagttccctggg

SEQ ID NO: 1280 - DNA, 23 bp, Artificial Sequence
  sgRNA
cacttgggtagaataacgcgtgg

SEQ ID NO: 1281 - DNA, 23 bp, Artificial Sequence
  sgRNA
gtagaataacgcgtggagtatgg

SEQ ID NO: 1282 - DNA, 23 bp, Artificial Sequence
  sgRNA
tagaataacgcgtggagtatggg

SEQ ID NO: 1283 - DNA, 23 bp, Artificial Sequence
  sgRNA
agaataacgcgtggagtatgggg

SEQ ID NO: 1284 - DNA, 23 bp, Artificial Sequence
  sgRNA
ggagtatggggcctcagtgaagg

SEQ ID NO: 1285 - DNA, 23 bp, Artificial Sequence
  sgRNA
ggtgctgaacttcttccagttgg

SEQ ID NO: 1286 - DNA, 23 bp, Artificial Sequence
  sgRNA
gtgctgaacttcttccagttggg

SEQ ID NO: 1287 - DNA, 23 bp, Artificial Sequence
  sgRNA
tttctgaactttaataaacaagg

SEQ ID NO: 1288 - DNA, 23 bp, Artificial Sequence
  sgRNA
aaacaaggagccaagcactctgg

SEQ ID NO: 1289 - DNA, 23 bp, Artificial Sequence
  sgRNA
actctggctttagaatagaaagg

SEQ ID NO: 1290 - DNA, 23 bp, Artificial Sequence
  sgRNA
ctctggctttagaatagaaaggg

SEQ ID NO: 1291 - DNA, 23 bp, Artificial Sequence
  sgRNA
ccttcagtccatctgctctctgg

SEQ ID NO: 1292 - DNA, 23 bp, Artificial Sequence
  sgRNA
ggcccccatgttcatgtcactgg

SEQ ID NO: 1293 - DNA, 23 bp, Artificial Sequence
  sgRNA
actggctgagttgagttctcagg

SEQ ID NO: 1294 - DNA, 23 bp, Artificial Sequence
  sgRNA
atacctgtccccagctgtcccgg

SEQ ID NO: 1295 - DNA, 23 bp, Artificial Sequence
  sgRNA
cggaagacactgtgaccttcagg

SEQ ID NO: 1296 - DNA, 23 bp, Artificial Sequence
  sgRNA
gaccttcaggtatgcagctctgg

SEQ ID NO: 1297 - DNA, 23 bp, Artificial Sequence
  sgRNA
caggtatgcagctctggcaaagg

SEQ ID NO: 1298 - DNA, 23 bp, Artificial Sequence
  sgRNA
tcacccccagatttgtcttcagg

SEQ ID NO: 1299 - DNA, 23 bp, Artificial Sequence
  sgRNA
cagatttgtcttcaggcctttgg

SEQ ID NO: 1300 - DNA, 23 bp, Artificial Sequence
  sgRNA
agatttgtcttcaggcctttggg

SEQ ID NO: 1301 - DNA, 23 bp, Artificial Sequence
  sgRNA
cttcaggcctttgggctctctgg

SEQ ID NO: 1302 - DNA, 23 bp, Artificial Sequence
  sgRNA
ttgggctctctggtcactgcagg

SEQ ID NO: 1303 - DNA, 23 bp, Artificial Sequence
  sgRNA
tgcaggctgtccttcgcatgtgg

SEQ ID NO: 1304 - DNA, 23 bp, Artificial Sequence
  sgRNA
gtccttcgcatgtggctttaagg

SEQ ID NO: 1305 - DNA, 23 bp, Artificial Sequence
  sgRNA
cgcatgtggctttaaggagtagg

SEQ ID NO: 1306 - DNA, 23 bp, Artificial Sequence
  sgRNA
tctgaattgtaatccacagttgg

SEQ ID NO: 1307 - DNA, 23 bp, Artificial Sequence
  sgRNA
gaattgtaatccacagttggagg

SEQ ID NO: 1308 - DNA, 23 bp, Artificial Sequence
  sgRNA
aattgtaatccacagttggaggg

SEQ ID NO: 1309 - DNA, 23 bp, Artificial Sequence
  sgRNA
gggcactttcccttagtaaatgg

SEQ ID NO: 1310 - DNA, 23 bp, Artificial Sequence
  sgRNA
agtattattcatccagcatatgg

SEQ ID NO: 1311 - DNA, 23 bp, Artificial Sequence
  sgRNA
gtattattcatccagcatatggg

SEQ ID NO: 1312 - DNA, 23 bp, Artificial Sequence
  sgRNA
tattattcatccagcatatgggg

SEQ ID NO: 1313 - DNA, 23 bp, Artificial Sequence
  sgRNA
atatggggaccaacatgtgatgg

SEQ ID NO: 1314 - DNA, 23 bp, Artificial Sequence
  sgRNA
caacatgtgatggcctcgatcgg

SEQ ID NO: 1315 - DNA, 23 bp, Artificial Sequence
  sgRNA
tgacctgcctgaaatgcatgtgg

SEQ ID NO: 1316 - DNA, 23 bp, Artificial Sequence
  sgRNA
gacctgcctgaaatgcatgtggg

SEQ ID NO: 1317 - DNA, 23 bp, Artificial Sequence
  sgRNA
ctgaaatgcatgtgggtgattgg

SEQ ID NO: 1318 - DNA, 23 bp, Artificial Sequence
  sgRNA
ttggatgctctttgaaaacatgg

SEQ ID NO: 1319 - DNA, 23 bp, Artificial Sequence
  sgRNA
tggatgctctttgaaaacatggg

SEQ ID NO: 1320 - DNA, 23 bp, Artificial Sequence
  sgRNA
gctgctgcctctacgttcaatgg

SEQ ID NO: 1321 - DNA, 23 bp, Artificial Sequence
  sgRNA
ctacgttcaatggcttccagagg

SEQ ID NO: 1322 - DNA, 23 bp, Artificial Sequence
  sgRNA
acgatctactatgtgatgtcagg

SEQ ID NO: 1323 - DNA, 23 bp, Artificial Sequence
  sgRNA
cgatctactatgtgatgtcaggg

SEQ ID NO: 1324 - DNA, 23 bp, Artificial Sequence
  sgRNA
tgtcgtctcagtgtgaaattcgg

SEQ ID NO: 1325 - DNA, 23 bp, Artificial Sequence
  sgRNA
gtgccacgctcagaaccagcagg

SEQ ID NO: 1326 - DNA, 23 bp, Artificial Sequence
  sgRNA
cagaaccagcaggctccttttgg

SEQ ID NO: 1327 - DNA, 23 bp, Artificial Sequence
  sgRNA
ccagcaggctccttttggaacgg

SEQ ID NO: 1328 - DNA, 23 bp, Artificial Sequence
  sgRNA
cagcaggctccttttggaacggg

SEQ ID NO: 1329 - DNA, 23 bp, Artificial Sequence
  sgRNA
gagctaaatatcgatgttgttgg

SEQ ID NO: 1330 - DNA, 23 bp, Artificial Sequence
  sgRNA
cgacttcccacccgaagtagagg

SEQ ID NO: 1331 - DNA, 23 bp, Artificial Sequence
  sgRNA
cccacccgaagtagaggaacagg

SEQ ID NO: 1332 - DNA, 23 bp, Artificial Sequence
  sgRNA
ccctgcctgtgtcttgtgcctgg

SEQ ID NO: 1333 - DNA, 23 bp, Artificial Sequence
  sgRNA
cctgcctgtgtcttgtgcctggg

SEQ ID NO: 1334 - DNA, 23 bp, Artificial Sequence
  sgRNA
gtgtcttgtgcctgggagagtgg

SEQ ID NO: 1335 - DNA, 23 bp, Artificial Sequence
  sgRNA
tgtcttgtgcctgggagagtggg

SEQ ID NO: 1336 - DNA, 23 bp, Artificial Sequence
  sgRNA
ccacagagcagcctgtgcttcgg

SEQ ID NO: 1337 - DNA, 23 bp, Artificial Sequence
  sgRNA
ttaatgtgtagatagcactctgg

SEQ ID NO: 1338 - DNA, 23 bp, Artificial Sequence
  sgRNA
tgcaagtttagcttgaattaagg

SEQ ID NO: 1339 - DNA, 23 bp, Artificial Sequence
  sgRNA
gcaagtttagcttgaattaaggg

SEQ ID NO: 1340 - DNA, 23 bp, Artificial Sequence
  sgRNA
ttagcttgaattaagggatttgg

SEQ ID NO: 1341 - DNA, 23 bp, Artificial Sequence
  sgRNA
tagcttgaattaagggatttggg

SEQ ID NO: 1342 - DNA, 23 bp, Artificial Sequence
  sgRNA
agcttgaattaagggatttgggg

SEQ ID NO: 1343 - DNA, 23 bp, Artificial Sequence
  sgRNA
gcttgaattaagggatttggggg

SEQ ID NO: 1344 - DNA, 23 bp, Artificial Sequence
  sgRNA
cttgaattaagggatttgggggg

SEQ ID NO: 1345 - DNA, 23 bp, Artificial Sequence
  sgRNA
tgaaatgtctttgtaagagtagg

SEQ ID NO: 1346 - DNA, 23 bp, Artificial Sequence
  sgRNA
gaaatgtctttgtaagagtaggg

SEQ ID NO: 1347 - DNA, 23 bp, Artificial Sequence
  sgRNA
caagaaatcatgaacaactttgg

SEQ ID NO: 1348 - DNA, 23 bp, Artificial Sequence
  sgRNA
gactgccacttcctcgatgaagg

SEQ ID NO: 1349 - DNA, 23 bp, Artificial Sequence
  sgRNA
cgatgaaggttttactgccaagg

SEQ ID NO: 1350 - DNA, 23 bp, Artificial Sequence
  sgRNA
ttttactgccaaggacattctgg

SEQ ID NO: 1351 - DNA, 23 bp, Artificial Sequence
  sgRNA
tgataaggatgccttctatgtgg

SEQ ID NO: 1352 - DNA, 23 bp, Artificial Sequence
  sgRNA
tgccttctatgtggcagacctgg

SEQ ID NO: 1353 - DNA, 23 bp, Artificial Sequence
  sgRNA
gccttctatgtggcagacctggg

SEQ ID NO: 1354 - DNA, 23 bp, Artificial Sequence
  sgRNA
acattctaaagaaacatctgagg

SEQ ID NO: 1355 - DNA, 23 bp, Artificial Sequence
  sgRNA
ttctaaagaaacatctgaggtgg

SEQ ID NO: 1356 - DNA, 23 bp, Artificial Sequence
  sgRNA
gtgaagacccttgctgctaccgg

SEQ ID NO: 1357 - DNA, 23 bp, Artificial Sequence
  sgRNA
tgaagacccttgctgctaccggg

SEQ ID NO: 1358 - DNA, 23 bp, Artificial Sequence
  sgRNA
acccttgctgctaccgggacagg

SEQ ID NO: 1359 - DNA, 23 bp, Artificial Sequence
  sgRNA
ggcggccgcgcagcaggtgcagg

SEQ ID NO: 1360 - DNA, 23 bp, Artificial Sequence
  sgRNA
gcggccgcgcagcaggtgcaggg

SEQ ID NO: 1361 - DNA, 23 bp, Artificial Sequence
  sgRNA
cggccgcgcagcaggtgcagggg

SEQ ID NO: 1362 - DNA, 23 bp, Artificial Sequence
  sgRNA
aggtgcaggggcgcagagcccgg

SEQ ID NO: 1363 - DNA, 23 bp, Artificial Sequence
  sgRNA
ggtgcaggggcgcagagcccggg

SEQ ID NO: 1364 - DNA, 23 bp, Artificial Sequence
  sgRNA
cgcagagcccgggctcgccttgg

SEQ ID NO: 1365 - DNA, 23 bp, Artificial Sequence
  sgRNA
ctcgccttggtacagacgagcgg

SEQ ID NO: 1366 - DNA, 23 bp, Artificial Sequence
  sgRNA
tcgccttggtacagacgagcggg

SEQ ID NO: 1367 - DNA, 23 bp, Artificial Sequence
  sgRNA
tggtacagacgagcgggccccgg

SEQ ID NO: 1368 - DNA, 23 bp, Artificial Sequence
  sgRNA
agacgagcgggccccggccttgg

SEQ ID NO: 1369 - DNA, 23 bp, Artificial Sequence
  sgRNA
cagagcagatgacaccaatttgg

SEQ ID NO: 1370 - DNA, 23 bp, Artificial Sequence
  sgRNA
aatttggaaacccgcgagagtgg

SEQ ID NO: 1371 - DNA, 23 bp, Artificial Sequence
  sgRNA
atttggaaacccgcgagagtggg

SEQ ID NO: 1372 - DNA, 23 bp, Artificial Sequence
  sgRNA
tagctgtgatattagatgctcgg

SEQ ID NO: 1373 - DNA, 23 bp, Artificial Sequence
  sgRNA
gatgctcggccatgacttagagg

SEQ ID NO: 1374 - DNA, 23 bp, Artificial Sequence
  sgRNA
gacttagaggtgtttatttaagg

SEQ ID NO: 1375 - DNA, 23 bp, Artificial Sequence
  sgRNA
tttaaggactgtgaatgactcgg

SEQ ID NO: 1376 - DNA, 23 bp, Artificial Sequence
  sgRNA
tgtgaatgactcggtgatttcgg

SEQ ID NO: 1377 - DNA, 23 bp, Artificial Sequence
  sgRNA
tcggtgatttcggaaaagcttgg

SEQ ID NO: 1378 - DNA, 23 bp, Artificial Sequence
  sgRNA
aaaagcttggcttagatgaacgg

SEQ ID NO: 1379 - DNA, 23 bp, Artificial Sequence
  sgRNA
ttagatgaacggacatacacagg

SEQ ID NO: 1380 - DNA, 23 bp, Artificial Sequence
  sgRNA
tagatgaacggacatacacaggg

SEQ ID NO: 1381 - DNA, 23 bp, Artificial Sequence
  sgRNA
agatgaacggacatacacagggg

SEQ ID NO: 1382 - DNA, 23 bp, Artificial Sequence
  sgRNA
cggcgtaatcaacccagcgttgg

SEQ ID NO: 1383 - DNA, 23 bp, Artificial Sequence
  sgRNA
aaatactttccgtcagactctgg

SEQ ID NO: 1384 - DNA, 23 bp, Artificial Sequence
  sgRNA
gtgagaatcatagctgagcccgg

SEQ ID NO: 1385 - DNA, 23 bp, Artificial Sequence
  sgRNA
tgccaagaaaattgtattaaagg

SEQ ID NO: 1386 - DNA, 23 bp, Artificial Sequence
  sgRNA
aattgtattaaaggaacagacgg

SEQ ID NO: 1387 - DNA, 23 bp, Artificial Sequence
  sgRNA
attgtattaaaggaacagacggg

SEQ ID NO: 1388 - DNA, 23 bp, Artificial Sequence
  sgRNA
tttatgtattatgtgaatgatgg

SEQ ID NO: 1389 - DNA, 23 bp, Artificial Sequence
  sgRNA
tatgtgaatgatggcgtctatgg

SEQ ID NO: 1390 - DNA, 23 bp, Artificial Sequence
  sgRNA
cgacttcccacccgaagtagagg

SEQ ID NO: 1391 - DNA, 23 bp, Artificial Sequence
  sgRNA
cccacccgaagtagaggaacagg

SEQ ID NO: 1392 - DNA, 23 bp, Artificial Sequence
  sgRNA
ccctgcctgtgtcttgtgcctgg

SEQ ID NO: 1393 - DNA, 23 bp, Artificial Sequence
  sgRNA
cctgcctgtgtcttgtgcctggg

SEQ ID NO: 1394 - DNA, 23 bp, Artificial Sequence
  sgRNA
gtgtcttgtgcctgggagagtgg

SEQ ID NO: 1395 - DNA, 23 bp, Artificial Sequence
  sgRNA
tgtcttgtgcctgggagagtggg

SEQ ID NO: 1396 - DNA, 23 bp, Artificial Sequence
  sgRNA
ccacagagcagcctgtgcttcgg

SEQ ID NO: 1397 - DNA, 23 bp, Artificial Sequence
  sgRNA
ttaatgtgtagatagcactctgg

SEQ ID NO: 1398 - DNA, 23 bp, Artificial Sequence
  sgRNA
tgcaagtttagcttgaattaagg

SEQ ID NO: 1399 - DNA, 23 bp, Artificial Sequence
  sgRNA
gcaagtttagcttgaattaaggg

SEQ ID NO: 1400 - DNA, 23 bp, Artificial Sequence
  sgRNA
ttagcttgaattaagggatttgg

SEQ ID NO: 1401 - DNA, 23 bp, Artificial Sequence
  sgRNA
tagcttgaattaagggatttggg

SEQ ID NO: 1402 - DNA, 23 bp, Artificial Sequence
  sgRNA
agcttgaattaagggatttgggg

SEQ ID NO: 1403 - DNA, 23 bp, Artificial Sequence
  sgRNA
gcttgaattaagggatttggggg

SEQ ID NO: 1404 - DNA, 23 bp, Artificial Sequence
  sgRNA
cttgaattaagggatttgggggg

SEQ ID NO: 1405 - DNA, 23 bp, Artificial Sequence
  sgRNA
tgaaatgtctttgtaagagtagg

SEQ ID NO: 1406 - DNA, 23 bp, Artificial Sequence
  sgRNA
gaaatgtctttgtaagagtaggg

SEQ ID NO: 1407 - DNA, 23 bp, Artificial Sequence
  sgRNA
gtcgccatgatgcagccatatgg

SEQ ID NO: 1408 - DNA, 23 bp, Artificial Sequence
  sgRNA
atgcagccatatggaagactagg

SEQ ID NO: 1409 - DNA, 23 bp, Artificial Sequence
  sgRNA
ccatatggaagactaggatatgg

SEQ ID NO: 1410 - DNA, 23 bp, Artificial Sequence
  sgRNA
catatggaagactaggatatggg

SEQ ID NO: 1411 - DNA, 23 bp, Artificial Sequence
  sgRNA
cacacttatctgtgttcctatgg

SEQ ID NO: 1412 - DNA, 23 bp, Artificial Sequence
  sgRNA
atttgaatatttgttttatatgg

SEQ ID NO: 1413 - DNA, 23 bp, Artificial Sequence
  sgRNA
agcatttgtagcttgtacaatgg

SEQ ID NO: 1414 - DNA, 23 bp, Artificial Sequence
  sgRNA
tagcttgtacaatggcagaatgg

SEQ ID NO: 1415 - DNA, 23 bp, Artificial Sequence
  sgRNA
agcttgtacaatggcagaatggg

SEQ ID NO: 1416 - DNA, 23 bp, Artificial Sequence
  sgRNA
taaagtatcttgaaataattagg

SEQ ID NO: 1417 - DNA, 23 bp, Artificial Sequence
  sgRNA
atcttgaaataattaggcattgg

SEQ ID NO: 1418 - DNA, 23 bp, Artificial Sequence
  sgRNA
tcttgaaataattaggcattggg

SEQ ID NO: 1419 - DNA, 23 bp, Artificial Sequence
  sgRNA
taggcattgggacgtttttatgg

SEQ ID NO: 1420 - DNA, 23 bp, Artificial Sequence
  sgRNA
gattctcagagaacaatgagtgg

SEQ ID NO: 1421 - DNA, 23 bp, Artificial Sequence
  sgRNA
attctcagagaacaatgagtggg

SEQ ID NO: 1422 - DNA, 23 bp, Artificial Sequence
  sgRNA
gagtgggtccacccacacacagg

SEQ ID NO: 1423 - DNA, 23 bp, Artificial Sequence
  sgRNA
gggtccacccacacacaggtagg

SEQ ID NO: 1424 - DNA, 23 bp, Artificial Sequence
  sgRNA
tccacccacacacaggtaggagg

SEQ ID NO: 1425 - DNA, 23 bp, Artificial Sequence
  sgRNA
ccacacacaggtaggaggacagg

SEQ ID NO: 1426 - DNA, 23 bp, Artificial Sequence
  sgRNA
aggtaggaggacaggtgagacgg

SEQ ID NO: 1427 - DNA, 23 bp, Artificial Sequence
  sgRNA
ggaagccccatcctcccatgtgg

SEQ ID NO: 1428 - DNA, 23 bp, Artificial Sequence
  sgRNA
gccccatcctcccatgtggacgg

SEQ ID NO: 1429 - DNA, 23 bp, Artificial Sequence
  sgRNA
ccaccccacatgtccagagttgg

SEQ ID NO: 1430 - DNA, 23 bp, Artificial Sequence
  sgRNA
aactccttgtccagagcctctgg

SEQ ID NO: 1431 - DNA, 23 bp, Artificial Sequence
  sgRNA
tccttgtccagagcctctggtgg

SEQ ID NO: 1432 - DNA, 23 bp, Artificial Sequence
  sgRNA
ttgtccagagcctctggtggtgg

SEQ ID NO: 1433 - DNA, 23 bp, Artificial Sequence
  sgRNA
tgtccagagcctctggtggtggg

SEQ ID NO: 1434 - DNA, 23 bp, Artificial Sequence
  sgRNA
tgggacctacttaagtctgacgg

SEQ ID NO: 1435 - DNA, 23 bp, Artificial Sequence
  sgRNA
ctgacggacctgtcctgtccagg

SEQ ID NO: 1436 - DNA, 23 bp, Artificial Sequence
  sgRNA
tcctgtccaggccagtgcccagg

SEQ ID NO: 1437 - DNA, 23 bp, Artificial Sequence
  sgRNA
cctgtccaggccagtgcccaggg

SEQ ID NO: 1438 - DNA, 23 bp, Artificial Sequence
  sgRNA
tccaggccagtgcccagggaagg

SEQ ID NO: 1439 - DNA, 23 bp, Artificial Sequence
  sgRNA
gccagtgcccagggaaggtgtgg

SEQ ID NO: 1440 - DNA, 23 bp, Artificial Sequence
  sgRNA
ccagtgcccagggaaggtgtggg

SEQ ID NO: 1441 - DNA, 23 bp, Artificial Sequence
  sgRNA
gtgcccagggaaggtgtgggagg

SEQ ID NO: 1442 - DNA, 23 bp, Artificial Sequence
  sgRNA
tgtgggaggccctttgagcctgg

SEQ ID NO: 1443 - DNA, 23 bp, Artificial Sequence
  sgRNA
cttcatgcctgtgagaagttagg

SEQ ID NO: 1444 - DNA, 23 bp, Artificial Sequence
  sgRNA
tgagaagttaggaatgtatacgg

SEQ ID NO: 1445 - DNA, 23 bp, Artificial Sequence
  sgRNA
aatgtatacggtaccacatttgg

SEQ ID NO: 1446 - DNA, 23 bp, Artificial Sequence
  sgRNA
cgatcctgagaccttcgtgcagg

SEQ ID NO: 1447 - DNA, 23 bp, Artificial Sequence
  sgRNA
tgcccgctgtgtttttgacatgg

SEQ ID NO: 1448 - DNA, 23 bp, Artificial Sequence
  sgRNA
gcccgctgtgtttttgacatggg

SEQ ID NO: 1449 - DNA, 23 bp, Artificial Sequence
  sgRNA
cccgctgtgtttttgacatgggg

SEQ ID NO: 1450 - DNA, 23 bp, Artificial Sequence
  sgRNA
agcatgtatctgcttgatattgg

SEQ ID NO: 1451 - DNA, 23 bp, Artificial Sequence
  sgRNA
atgtatctgcttgatattggcgg

SEQ ID NO: 1452 - DNA, 23 bp, Artificial Sequence
  sgRNA
tatctgcttgatattggcggtgg

SEQ ID NO: 1453 - DNA, 23 bp, Artificial Sequence
  sgRNA
gatattggcggtggctttcctgg

SEQ ID NO: 1454 - DNA, 23 bp, Artificial Sequence
  sgRNA
cggtggctttcctggatctgagg

SEQ ID NO: 1455 - DNA, 23 bp, Artificial Sequence
  sgRNA
aatacagttggtgcagagtctgg

SEQ ID NO: 1456 - DNA, 23 bp, Artificial Sequence
  sgRNA
atacagttggtgcagagtctggg

SEQ ID NO: 1457 - DNA, 23 bp, Artificial Sequence
  sgRNA
tacagttggtgcagagtctgggg

SEQ ID NO: 1458 - DNA, 23 bp, Artificial Sequence
  sgRNA
acagttggtgcagagtctggggg

SEQ ID NO: 1459 - DNA, 23 bp, Artificial Sequence
  sgRNA
gtctgggggtgcctccagagagg

SEQ ID NO: 1460 - DNA, 23 bp, Artificial Sequence
  sgRNA
attaagtatgctgctaataatgg

SEQ ID NO: 1461 - DNA, 23 bp, Artificial Sequence
  sgRNA
ggcgccccaccagctccgcgcgg

SEQ ID NO: 1462 - DNA, 23 bp, Artificial Sequence
  sgRNA
gcgccccaccagctccgcgcggg

SEQ ID NO: 1463 - DNA, 23 bp, Artificial Sequence
  sgRNA
ccaccagctccgcgcgggcccgg

SEQ ID NO: 1464 - DNA, 23 bp, Artificial Sequence
  sgRNA
caccagctccgcgcgggcccggg

SEQ ID NO: 1465 - DNA, 23 bp, Artificial Sequence
  sgRNA
agctccgcgcgggcccgggttgg

SEQ ID NO: 1466 - DNA, 23 bp, Artificial Sequence
  sgRNA
gggcccgggttggccaccgccgg

SEQ ID NO: 1467 - DNA, 23 bp, Artificial Sequence
  sgRNA
ggcccgggttggccaccgccggg

SEQ ID NO: 1468 - DNA, 23 bp, Artificial Sequence
  sgRNA
ccgggcccccgcccctcccccgg

SEQ ID NO: 1469 - DNA, 23 bp, Artificial Sequence
  sgRNA
ggcccccgcccctcccccggcgg

SEQ ID NO: 1470 - DNA, 23 bp, Artificial Sequence
  sgRNA
cccctcccccggcggtgtcccgg

SEQ ID NO: 1471 - DNA, 23 bp, Artificial Sequence
  sgRNA
tcccccggcggtgtcccggccgg

SEQ ID NO: 1472 - DNA, 23 bp, Artificial Sequence
  sgRNA
gtcccggccggaaccgatcgtgg

SEQ ID NO: 1473 - DNA, 23 bp, Artificial Sequence
  sgRNA
cggccggaaccgatcgtggctgg

SEQ ID NO: 1474 - DNA, 23 bp, Artificial Sequence
  sgRNA
cgatcgtggctggtttgagctgg

SEQ ID NO: 1475 - DNA, 23 bp, Artificial Sequence
  sgRNA
tttgagctggtgcgtctccatgg

SEQ ID NO: 1476 - DNA, 23 bp, Artificial Sequence
  sgRNA
gcgtctccatggcgacccgccgg

SEQ ID NO: 1477 - DNA, 23 bp, Artificial Sequence
  sgRNA
gacccgccggtgctataagtagg

SEQ ID NO: 1478 - DNA, 23 bp, Artificial Sequence
  sgRNA
acccgccggtgctataagtaggg

SEQ ID NO: 1479 - DNA, 23 bp, Artificial Sequence
  sgRNA
ccggtgctataagtagggagcgg

SEQ ID NO: 1480 - DNA, 23 bp, Artificial Sequence
  sgRNA
aagtagggagcggcgtgccgtgg

SEQ ID NO: 1481 - DNA, 23 bp, Artificial Sequence
  sgRNA
agtagggagcggcgtgccgtggg

SEQ ID NO: 1482 - DNA, 23 bp, Artificial Sequence
  sgRNA
gtagggagcggcgtgccgtgggg

SEQ ID NO: 1483 - DNA, 23 bp, Artificial Sequence
  sgRNA
cgcccctctgccagcagctccgg

SEQ ID NO: 1484 - DNA, 23 bp, Artificial Sequence
  sgRNA
cagcagctccggcgccacctcgg

SEQ ID NO: 1485 - DNA, 23 bp, Artificial Sequence
  sgRNA
agcagctccggcgccacctcggg

SEQ ID NO: 1486 - DNA, 23 bp, Artificial Sequence
  sgRNA
gctccggcgccacctcgggccgg

SEQ ID NO: 1487 - DNA, 23 bp, Artificial Sequence
  sgRNA
ccacctcgggccggcgtctccgg

SEQ ID NO: 1488 - DNA, 23 bp, Artificial Sequence
  sgRNA
cctcgggccggcgtctccggcgg

SEQ ID NO: 1489 - DNA, 23 bp, Artificial Sequence
  sgRNA
ctcgggccggcgtctccggcggg

SEQ ID NO: 1490 - DNA, 23 bp, Artificial Sequence
  sgRNA
gggccggcgtctccggcgggcgg

SEQ ID NO: 1491 - DNA, 23 bp, Artificial Sequence
  sgRNA
ggccggcgtctccggcgggcggg

SEQ ID NO: 1492 - DNA, 23 bp, Artificial Sequence
  sgRNA
gtctccggcgggcgggagccagg

SEQ ID NO: 1493 - DNA, 23 bp, Artificial Sequence
  sgRNA
gggcgggagccaggcgctgacgg

SEQ ID NO: 1494 - DNA, 23 bp, Artificial Sequence
  sgRNA
ggcgggagccaggcgctgacggg

SEQ ID NO: 1495 - DNA, 23 bp, Artificial Sequence
  sgRNA
gagccaggcgctgacgggcgcgg

SEQ ID NO: 1496 - DNA, 23 bp, Artificial Sequence
  sgRNA
ccaggcgctgacgggcgcggcgg

SEQ ID NO: 1497 - DNA, 23 bp, Artificial Sequence
  sgRNA
caggcgctgacgggcgcggcggg

SEQ ID NO: 1498 - DNA, 23 bp, Artificial Sequence
  sgRNA
aggcgctgacgggcgcggcgggg

SEQ ID NO: 1499 - DNA, 23 bp, Artificial Sequence
  sgRNA
ggcgctgacgggcgcggcggggg

SEQ ID NO: 1500 - DNA, 23 bp, Artificial Sequence
  sgRNA
gctgacgggcgcggcgggggcgg

SEQ ID NO: 1501 - DNA, 23 bp, Artificial Sequence
  sgRNA
ggggcggccgagcgctcctgcgg

SEQ ID NO: 1502 - DNA, 23 bp, Artificial Sequence
  sgRNA
cgctcctgcggctgcgactcagg

SEQ ID NO: 1503 - DNA, 23 bp, Artificial Sequence
  sgRNA
tgcggctgcgactcaggctccgg

SEQ ID NO: 1504 - DNA, 23 bp, Artificial Sequence
  sgRNA
ccggcgtctgcgcttccccatgg

SEQ ID NO: 1505 - DNA, 23 bp, Artificial Sequence
  sgRNA
cggcgtctgcgcttccccatggg

SEQ ID NO: 1506 - DNA, 23 bp, Artificial Sequence
  sgRNA
ggcgtctgcgcttccccatgggg

SEQ ID NO: 1507 - DNA, 23 bp, Artificial Sequence
  sgRNA
tctgcgcttccccatggggctgg

SEQ ID NO: 1508 - DNA, 23 bp, Artificial Sequence
  sgRNA
ttccccatggggctggcctgcgg

SEQ ID NO: 1509 - DNA, 23 bp, Artificial Sequence
  sgRNA
tggggctggcctgcggcgcctgg

SEQ ID NO: 1510 - DNA, 23 bp, Artificial Sequence
  sgRNA
ggggctggcctgcggcgcctggg

SEQ ID NO: 1511 - DNA, 23 bp, Artificial Sequence
  sgRNA
tgttccaagggcacacgcagagg

SEQ ID NO: 1512 - DNA, 23 bp, Artificial Sequence
  sgRNA
gttccaagggcacacgcagaggg

SEQ ID NO: 1513 - DNA, 23 bp, Artificial Sequence
  sgRNA
agggcacacgcagagggatttgg

SEQ ID NO: 1514 - DNA, 23 bp, Artificial Sequence
  sgRNA
gcagagggatttggaattcctgg

SEQ ID NO: 1515 - DNA, 23 bp, Artificial Sequence
  sgRNA
gagttgcctttgtgagaagctgg

SEQ ID NO: 1516 - DNA, 23 bp, Artificial Sequence
  sgRNA
gacatcacatagtagatcgtcgg

SEQ ID NO: 1517 - DNA, 23 bp, Artificial Sequence
  sgRNA
catagtagatcgtcggcctctgg

SEQ ID NO: 1518 - DNA, 23 bp, Artificial Sequence
  sgRNA
ctggaagccattgaacgtagagg

SEQ ID NO: 1519 - DNA, 23 bp, Artificial Sequence
  sgRNA
caatcacccacatgcatttcagg

SEQ ID NO: 1520 - DNA, 23 bp, Artificial Sequence
  sgRNA
cacccacatgcatttcaggcagg

SEQ ID NO: 1521 - DNA, 23 bp, Artificial Sequence
  sgRNA
agcgctcaacaatccgatcgagg

SEQ ID NO: 1522 - DNA, 23 bp, Artificial Sequence
  sgRNA
cgatcgaggccatcacatgttgg

SEQ ID NO: 1523 - DNA, 23 bp, Artificial Sequence
  sgRNA
acatgttggtccccatatgctgg

SEQ ID NO: 1524 - DNA, 23 bp, Artificial Sequence
  sgRNA
gatgaataatacttctcatctgg

SEQ ID NO: 1525 - DNA, 23 bp, Artificial Sequence
  sgRNA
taatacttctcatctggtttagg

SEQ ID NO: 1526 - DNA, 23 bp, Artificial Sequence
  sgRNA
gctctttcgcccgttccaaaagg

SEQ ID NO: 1527 - DNA, 23 bp, Artificial Sequence
  sgRNA
ccgttccaaaaggagcctgctgg

SEQ ID NO: 1528 - DNA, 23 bp, Artificial Sequence
  sgRNA
gagcctgctggttctgagcgtgg

SEQ ID NO: 1529 - DNA, 23 bp, Artificial Sequence
  sgRNA
actgagacgacagactgctttgg

SEQ ID NO: 1530 - DNA, 23 bp, Artificial Sequence
  sgRNA
gactgctttggaatcatcagtgg

SEQ ID NO: 1531 - DNA, 23 bp, Artificial Sequence
  sgRNA
ctagcagtaattaagttacatgg

SEQ ID NO: 1532 - DNA, 23 bp, Artificial Sequence
  sgRNA
attaatactagccgaagcacagg

SEQ ID NO: 1533 - DNA, 23 bp, Artificial Sequence
  sgRNA
ccgaagcacaggctgctctgtgg

SEQ ID NO: 1534 - DNA, 23 bp, Artificial Sequence
  sgRNA
gcgtttcatcccactctcccagg

SEQ ID NO: 1535 - DNA, 23 bp, Artificial Sequence
  sgRNA
ctctcccaggcacaagacacagg

SEQ ID NO: 1536 - DNA, 23 bp, Artificial Sequence
  sgRNA
cccaggcacaagacacaggcagg

SEQ ID NO: 1537 - DNA, 23 bp, Artificial Sequence
  sgRNA
ccaggcacaagacacaggcaggg

SEQ ID NO: 1538 - DNA, 23 bp, Artificial Sequence
  sgRNA
acaagacacaggcagggtgctgg

SEQ ID NO: 1539 - DNA, 23 bp, Artificial Sequence
  sgRNA
ggcatcctgttcctctacttcgg

SEQ ID NO: 1540 - DNA, 23 bp, Artificial Sequence
  sgRNA
gcatcctgttcctctacttcggg

SEQ ID NO: 1541 - DNA, 23 bp, Artificial Sequence
  sgRNA
tcctgttcctctacttcgggtgg

SEQ ID NO: 1542 - DNA, 23 bp, Artificial Sequence
  sgRNA
cctgttcctctacttcgggtggg

SEQ ID NO: 1543 - DNA, 23 bp, Artificial Sequence
  sgRNA
ctctacttcgggtgggaagtcgg

SEQ ID NO: 1544 - DNA, 23 bp, Artificial Sequence
  sgRNA
tctacttcgggtgggaagtcggg

SEQ ID NO: 1545 - DNA, 23 bp, Artificial Sequence
  sgRNA
ctacttcgggtgggaagtcgggg

SEQ ID NO: 1546 - DNA, 23 bp, Artificial Sequence
  sgRNA
cgggtgggaagtcggggttctgg

SEQ ID NO: 1547 - DNA, 23 bp, Artificial Sequence
  sgRNA
aagaaacttcattaattttctgg

SEQ ID NO: 1548 - DNA, 23 bp, Artificial Sequence
  sgRNA
tttctggtccagaatgtccttgg

SEQ ID NO: 1549 - DNA, 23 bp, Artificial Sequence
  sgRNA
tggcagtaaaaccttcatcgagg

SEQ ID NO: 1550 - DNA, 23 bp, Artificial Sequence
  sgRNA
taaaaccttcatcgaggaagtgg

SEQ ID NO: 1551 - DNA, 23 bp, Artificial Sequence
  sgRNA
agcacagtcaaatcctgtcccgg

SEQ ID NO: 1552 - DNA, 23 bp, Artificial Sequence
  sgRNA
atcctgtcccggtagcagcaagg

SEQ ID NO: 1553 - DNA, 23 bp, Artificial Sequence
  sgRNA
tcctgtcccggtagcagcaaggg

SEQ ID NO: 1554 - DNA, 23 bp, Artificial Sequence
  sgRNA
agcagcaagggtcttcacgatgg

SEQ ID NO: 1555 - DNA, 23 bp, Artificial Sequence
  sgRNA
attacatttgactgcataaaagg

SEQ ID NO: 1556 - DNA, 23 bp, Artificial Sequence
  sgRNA
ttacatttgactgcataaaaggg

SEQ ID NO: 1557 - DNA, 23 bp, Artificial Sequence
  sgRNA
tacatttgactgcataaaagggg

SEQ ID NO: 1558 - DNA, 23 bp, Artificial Sequence
  sgRNA
acatttgactgcataaaaggggg

SEQ ID NO: 1559 - DNA, 23 bp, Artificial Sequence
  sgRNA
gcataaaagggggtgacacgagg

SEQ ID NO: 1560 - DNA, 23 bp, Artificial Sequence
  sgRNA
cataaaagggggtgacacgaggg

SEQ ID NO: 1561 - DNA, 23 bp, Artificial Sequence
  sgRNA
gtttctttagaatgtctcccagg

SEQ ID NO: 1562 - DNA, 23 bp, Artificial Sequence
  sgRNA
tcccaggtctgccacatagaagg

SEQ ID NO: 1563 - DNA, 23 bp, Artificial Sequence
  sgRNA
aaataaacacctctaagtcatgg

SEQ ID NO: 1564 - DNA, 23 bp, Artificial Sequence
  sgRNA
cttagctctacccactctcgcgg

SEQ ID NO: 1565 - DNA, 23 bp, Artificial Sequence
  sgRNA
ttagctctacccactctcgcggg

SEQ ID NO: 1566 - DNA, 23 bp, Artificial Sequence
  sgRNA
actctcgcgggtttccaaattgg

SEQ ID NO: 1567 - DNA, 23 bp, Artificial Sequence
  sgRNA
gacacagcgaaaataaaaactgg

SEQ ID NO: 1568 - DNA, 23 bp, Artificial Sequence
  sgRNA
cagcgaaaataaaaactggaagg

SEQ ID NO: 1569 - DNA, 23 bp, Artificial Sequence
  sgRNA
aaaaactggaaggaaactgaagg

SEQ ID NO: 1570 - DNA, 23 bp, Artificial Sequence
  sgRNA
gaaggaaactgaaggcgccaagg

SEQ ID NO: 1571 - DNA, 23 bp, Artificial Sequence
  sgRNA
gaaactgaaggcgccaaggccgg

SEQ ID NO: 1572 - DNA, 23 bp, Artificial Sequence
  sgRNA
aaactgaaggcgccaaggccggg

SEQ ID NO: 1573 - DNA, 23 bp, Artificial Sequence
  sgRNA
aactgaaggcgccaaggccgggg

SEQ ID NO: 1574 - DNA, 23 bp, Artificial Sequence
  sgRNA
gggcccgctcgtctgtaccaagg

SEQ ID NO: 1575 - DNA, 23 bp, Artificial Sequence
  sgRNA
cgtctgtaccaaggcgagcccgg

SEQ ID NO: 1576 - DNA, 23 bp, Artificial Sequence
  sgRNA
gtctgtaccaaggcgagcccggg

SEQ ID NO: 1577 - DNA, 23 bp, Artificial Sequence
  sgRNA
gcgcccctgcacctgctgcgcgg

SEQ ID NO: 1578 - DNA, 23 bp, Artificial Sequence
  sgRNA
gcacctgctgcgcggccgccagg

SEQ ID NO: 1579 - DNA, 23 bp, Artificial Sequence
  sgRNA
ttcctttaatacaattttcttgg

SEQ ID NO: 1580 - DNA, 23 bp, Artificial Sequence
  sgRNA
tgatgcaacatagtatctgccgg

SEQ ID NO: 1581 - DNA, 23 bp, Artificial Sequence
  sgRNA
gatgcaacatagtatctgccggg

SEQ ID NO: 1582 - DNA, 23 bp, Artificial Sequence
  sgRNA
attctcactccagagtctgacgg

SEQ ID NO: 1583 - DNA, 23 bp, Artificial Sequence
  sgRNA
ggaaagtatttgtccaacgctgg

SEQ ID NO: 1584 - DNA, 23 bp, Artificial Sequence
  sgRNA
gaaagtatttgtccaacgctggg

SEQ ID NO: 1585 - DNA, 23 bp, Artificial Sequence
  sgRNA
caacgctgggttgattacgccgg

SEQ ID NO: 1586 - DNA, 23 bp, Artificial Sequence
  sgRNA
gaaggggctttacatgtgcgtgg

SEQ ID NO: 1587 - DNA, 23 bp, Artificial Sequence
  sgRNA
atcattcacataatacataaagg

SEQ ID NO: 1588 - DNA, 23 bp, Artificial Sequence
  sgRNA
aataagctgactgccaaatgtgg

SEQ ID NO: 1589 - DNA, 23 bp, Artificial Sequence
  sgRNA
atacattcctaacttctcacagg

SEQ ID NO: 1590 - DNA, 23 bp, Artificial Sequence
  sgRNA
ctaacttctcacaggcatgaagg

SEQ ID NO: 1591 - DNA, 23 bp, Artificial Sequence
  sgRNA
acttctcacaggcatgaaggtgg

SEQ ID NO: 1592 - DNA, 23 bp, Artificial Sequence
  sgRNA
cttctcacaggcatgaaggtggg

SEQ ID NO: 1593 - DNA, 23 bp, Artificial Sequence
  sgRNA
ctcacaggcatgaaggtgggagg

SEQ ID NO: 1594 - DNA, 23 bp, Artificial Sequence
  sgRNA
tcacaggcatgaaggtgggaggg

SEQ ID NO: 1595 - DNA, 23 bp, Artificial Sequence
  sgRNA
cacaggcatgaaggtgggagggg

SEQ ID NO: 1596 - DNA, 23 bp, Artificial Sequence
  sgRNA
catgaaggtgggaggggacacgg

SEQ ID NO: 1597 - DNA, 23 bp, Artificial Sequence
  sgRNA
aaggtgggaggggacacggatgg

SEQ ID NO: 1598 - DNA, 23 bp, Artificial Sequence
  sgRNA
gggacacggatggtctctgcagg

SEQ ID NO: 1599 - DNA, 23 bp, Artificial Sequence
  sgRNA
acggatggtctctgcaggccagg

SEQ ID NO: 1600 - DNA, 23 bp, Artificial Sequence
  sgRNA
tctctgcaggccaggctcaaagg

SEQ ID NO: 1601 - DNA, 23 bp, Artificial Sequence
  sgRNA
ctctgcaggccaggctcaaaggg

SEQ ID NO: 1602 - DNA, 23 bp, Artificial Sequence
  sgRNA
agggcctcccacaccttccctgg

SEQ ID NO: 1603 - DNA, 23 bp, Artificial Sequence
  sgRNA
gggcctcccacaccttccctggg

SEQ ID NO: 1604 - DNA, 23 bp, Artificial Sequence
  sgRNA
cccacaccttccctgggcactgg

SEQ ID NO: 1605 - DNA, 23 bp, Artificial Sequence
  sgRNA
accttccctgggcactggcctgg

SEQ ID NO: 1606 - DNA, 23 bp, Artificial Sequence
  sgRNA
ccctgggcactggcctggacagg

SEQ ID NO: 1607 - DNA, 23 bp, Artificial Sequence
  sgRNA
ggcactggcctggacaggacagg

SEQ ID NO: 1608 - DNA, 23 bp, Artificial Sequence
  sgRNA
caggtccgtcagacttaagtagg

SEQ ID NO: 1609 - DNA, 23 bp, Artificial Sequence
  sgRNA
taagtaggtcccaccaccagagg

SEQ ID NO: 1610 - DNA, 23 bp, Artificial Sequence
  sgRNA
ggtcccaccaccagaggctctgg

SEQ ID NO: 1611 - DNA, 23 bp, Artificial Sequence
  sgRNA
accaccagaggctctggacaagg

SEQ ID NO: 1612 - DNA, 23 bp, Artificial Sequence
  sgRNA
aaggagtttgcagccaactctgg

SEQ ID NO: 1613 - DNA, 23 bp, Artificial Sequence
  sgRNA
tgcagccaactctggacatgtgg

SEQ ID NO: 1614 - DNA, 23 bp, Artificial Sequence
  sgRNA
gcagccaactctggacatgtggg

SEQ ID NO: 1615 - DNA, 23 bp, Artificial Sequence
  sgRNA
cagccaactctggacatgtgggg

SEQ ID NO: 1616 - DNA, 23 bp, Artificial Sequence
  sgRNA
ccaactctggacatgtggggtgg

SEQ ID NO: 1617 - DNA, 23 bp, Artificial Sequence
  sgRNA
caactctggacatgtggggtggg

SEQ ID NO: 1618 - DNA, 23 bp, Artificial Sequence
  sgRNA
gcagatgtgcaccgtccacatgg

SEQ ID NO: 1619 - DNA, 23 bp, Artificial Sequence
  sgRNA
cagatgtgcaccgtccacatggg

SEQ ID NO: 1620 - DNA, 23 bp, Artificial Sequence
  sgRNA
atgtgcaccgtccacatgggagg

SEQ ID NO: 1621 - DNA, 23 bp, Artificial Sequence
  sgRNA
gcaccgtccacatgggaggatgg

SEQ ID NO: 1622 - DNA, 23 bp, Artificial Sequence
  sgRNA
caccgtccacatgggaggatggg

SEQ ID NO: 1623 - DNA, 23 bp, Artificial Sequence
  sgRNA
accgtccacatgggaggatgggg

SEQ ID NO: 1624 - DNA, 23 bp, Artificial Sequence
  sgRNA
cctgtcctcctacctgtgtgtgg

SEQ ID NO: 1625 - DNA, 23 bp, Artificial Sequence
  sgRNA
ctgtcctcctacctgtgtgtggg

SEQ ID NO: 1626 - DNA, 23 bp, Artificial Sequence
  sgRNA
tcctcctacctgtgtgtgggtgg

SEQ ID NO: 1627 - DNA, 23 bp, Artificial Sequence
  sgRNA
gagaatcagagcgagctatacgg

SEQ ID NO: 1628 - DNA, 23 bp, Artificial Sequence
  sgRNA
agaatcagagcgagctatacggg

SEQ ID NO: 1629 - DNA, 23 bp, Artificial Sequence
  sgRNA
tacgggattcgtgaactgtctgg

SEQ ID NO: 1630 - DNA, 23 bp, Artificial Sequence
  sgRNA
agatactttattttaaaaacagg

SEQ ID NO: 1631 - DNA, 23 bp, Artificial Sequence
  sgRNA
aggtcacaacactaagcttttgg

SEQ ID NO: 1632 - DNA, 23 bp, Artificial Sequence
  sgRNA
aaatgcttgttcagcagctgagg

SEQ ID NO: 1633 - DNA, 23 bp, Artificial Sequence
  sgRNA
aatgcttgttcagcagctgaggg

SEQ ID NO: 1634 - DNA, 23 bp, Artificial Sequence
  sgRNA
atgcttgttcagcagctgagggg

SEQ ID NO: 1635 - DNA, 23 bp, Artificial Sequence
  sgRNA
aatattcaaatagtttccatagg

SEQ ID NO: 1636 - DNA, 23 bp, Artificial Sequence
  sgRNA
ccatatcctagtcttccatatgg

SEQ ID NO: 1637 - DNA, 23 bp, Artificial Sequence
  sgRNA
tcttccatatggctgcatcatgg

SEQ ID NO: 1638 - DNA, 23 bp, Artificial Sequence
  sgRNA
ctagcagtaattaagttacatgg

SEQ ID NO: 1639 - DNA, 23 bp, Artificial Sequence
  sgRNA
attaatactagccgaagcacagg

SEQ ID NO: 1640 - DNA, 23 bp, Artificial Sequence
  sgRNA
ccgaagcacaggctgctctgtgg

SEQ ID NO: 1641 - DNA, 23 bp, Artificial Sequence
  sgRNA
gcgtttcatcccactctcccagg

SEQ ID NO: 1642 - DNA, 23 bp, Artificial Sequence
  sgRNA
ctctcccaggcacaagacacagg

SEQ ID NO: 1643 - DNA, 23 bp, Artificial Sequence
  sgRNA
cccaggcacaagacacaggcagg

SEQ ID NO: 1644 - DNA, 23 bp, Artificial Sequence
  sgRNA
ccaggcacaagacacaggcaggg

SEQ ID NO: 1645 - DNA, 23 bp, Artificial Sequence
  sgRNA
acaagacacaggcagggtgctgg

SEQ ID NO: 1646 - DNA, 23 bp, Artificial Sequence
  sgRNA
ggcatcctgttcctctacttcgg

SEQ ID NO: 1647 - DNA, 23 bp, Artificial Sequence
  sgRNA
gcatcctgttcctctacttcggg

SEQ ID NO: 1648 - DNA, 23 bp, Artificial Sequence
  sgRNA
tcctgttcctctacttcgggtgg

SEQ ID NO: 1649 - DNA, 23 bp, Artificial Sequence
  sgRNA
cctgttcctctacttcgggtggg

SEQ ID NO: 1650 - DNA, 23 bp, Artificial Sequence
  sgRNA
ctctacttcgggtgggaagtcgg

SEQ ID NO: 1651 - DNA, 23 bp, Artificial Sequence
  sgRNA
tctacttcgggtgggaagtcggg

SEQ ID NO: 1652 - DNA, 23 bp, Artificial Sequence
  sgRNA
ctacttcgggtgggaagtcgggg

SEQ ID NO: 1653 - DNA, 23 bp, Artificial Sequence
  sgRNA
cgggtgggaagtcggggttctgg

SEQ ID NO: 1654 - DNA, 23 bp, Artificial Sequence
  sgRNA
ccccatgtcaaaaacacagcggg

SEQ ID NO: 1655 - DNA, 23 bp, Artificial Sequence
  sgRNA
atcagagattgcctgcacgaagg

SEQ ID NO: 1656 - DNA, 23 bp, Artificial Sequence
  sgRNA
attgcctgcacgaaggtctcagg

SEQ ID NO: 1657 - DNA, 23 bp, Artificial Sequence
  sgRNA
ctgcacgaaggtctcaggatcgg

SEQ ID NO: 1658 - DNA, 23 bp, Artificial Sequence
  sgRNA
cggtacagccgcttcctacatgg

SEQ ID NO: 1659 - DNA, 23 bp, Artificial Sequence
  sgRNA
agtttcacatcctcagatccagg

SEQ ID NO: 1660 - DNA, 23 bp, Artificial Sequence
  sgRNA
cactatcaaaagtcatcatctgg

SEQ ID NO: 1661 - DNA, 23 bp, Artificial Sequence
  sgRNA
atttgagatacttgtttacaagg

SEQ ID NO: 1662 - DNA, 23 bp, Artificial Sequence
  sgRNA
tttgcatagataatcctctctgg

SEQ ID NO: 1663 - DNA, 23 bp, Artificial Sequence
  sgRNA
gcatagataatcctctctggagg

SEQ ID NO: 1664 - DNA, 23 bp, Artificial Sequence
  sgRNA
tcagagcgcccaggcgccgcagg

SEQ ID NO: 1665 - DNA, 23 bp, Artificial Sequence
  sgRNA
ggcgccgcaggccagccccatgg

SEQ ID NO: 1666 - DNA, 23 bp, Artificial Sequence
  sgRNA
gcgccgcaggccagccccatggg

SEQ ID NO: 1667 - DNA, 23 bp, Artificial Sequence
  sgRNA
cgccgcaggccagccccatgggg

SEQ ID NO: 1668 - DNA, 23 bp, Artificial Sequence
  sgRNA
ccatggggaagcgcagacgccgg

SEQ ID NO: 1669 - DNA, 23 bp, Artificial Sequence
  sgRNA
ggagcctgagtcgcagccgcagg

SEQ ID NO: 1670 - DNA, 23 bp, Artificial Sequence
  sgRNA
gtcgcagccgcaggagcgctcgg

SEQ ID NO: 1671 - DNA, 23 bp, Artificial Sequence
  sgRNA
ccgccgcgcccgtcagcgcctgg

SEQ ID NO: 1672 - DNA, 23 bp, Artificial Sequence
  sgRNA
agcgcctggctcccgcccgccgg

SEQ ID NO: 1673 - DNA, 23 bp, Artificial Sequence
  sgRNA
ctcccgcccgccggagacgccgg

SEQ ID NO: 1674 - DNA, 23 bp, Artificial Sequence
  sgRNA
ccgccggagacgccggcccgagg

SEQ ID NO: 1675 - DNA, 23 bp, Artificial Sequence
  sgRNA
ccggagacgccggcccgaggtgg

SEQ ID NO: 1676 - DNA, 23 bp, Artificial Sequence
  sgRNA
acgccggcccgaggtggcgccgg

SEQ ID NO: 1677 - DNA, 23 bp, Artificial Sequence
  sgRNA
cgaggtggcgccggagctgctgg

SEQ ID NO: 1678 - DNA, 23 bp, Artificial Sequence
  sgRNA
ggcgccggagctgctggcagagg

SEQ ID NO: 1679 - DNA, 23 bp, Artificial Sequence
  sgRNA
gcgccggagctgctggcagaggg

SEQ ID NO: 1680 - DNA, 23 bp, Artificial Sequence
  sgRNA
cgccggagctgctggcagagggg

SEQ ID NO: 1681 - DNA, 23 bp, Artificial Sequence
  sgRNA
cggagctgctggcagaggggcgg

SEQ ID NO: 1682 - DNA, 23 bp, Artificial Sequence
  sgRNA
agctgctggcagaggggcggcgg

SEQ ID NO: 1683 - DNA, 23 bp, Artificial Sequence
  sgRNA
gctgctggcagaggggcggcggg

SEQ ID NO: 1684 - DNA, 23 bp, Artificial Sequence
  sgRNA
gctggcagaggggcggcgggcgg

SEQ ID NO: 1685 - DNA, 23 bp, Artificial Sequence
  sgRNA
ggcagaggggcggcgggcggcgg

SEQ ID NO: 1686 - DNA, 23 bp, Artificial Sequence
  sgRNA
agaggggcggcgggcggcggcgg

SEQ ID NO: 1687 - DNA, 23 bp, Artificial Sequence
  sgRNA
ggggcggcgggcggcggcggcgg

SEQ ID NO: 1688 - DNA, 23 bp, Artificial Sequence
  sgRNA
gcggcgggcggcggcggcggcgg

SEQ ID NO: 1689 - DNA, 23 bp, Artificial Sequence
  sgRNA
gcggcggcggcggcggctacagg

SEQ ID NO: 1690 - DNA, 23 bp, Artificial Sequence
  sgRNA
gcggcggcggcggctacaggagg

SEQ ID NO: 1691 - DNA, 23 bp, Artificial Sequence
  sgRNA
cggcggcggcggctacaggaggg

SEQ ID NO: 1692 - DNA, 23 bp, Artificial Sequence
  sgRNA
gagggactgacaaagccccacgg

SEQ ID NO: 1693 - DNA, 23 bp, Artificial Sequence
  sgRNA
ccgctccctacttatagcaccgg

SEQ ID NO: 1694 - DNA, 23 bp, Artificial Sequence
  sgRNA
ctccctacttatagcaccggcgg

SEQ ID NO: 1695 - DNA, 23 bp, Artificial Sequence
  sgRNA
tccctacttatagcaccggcggg

SEQ ID NO: 1696 - DNA, 23 bp, Artificial Sequence
  sgRNA
atagcaccggcgggtcgccatgg

SEQ ID NO: 1697 - DNA, 23 bp, Artificial Sequence
  sgRNA
cagctcaaaccagccacgatcgg

SEQ ID NO: 1698 - DNA, 23 bp, Artificial Sequence
  sgRNA
aaaccagccacgatcggttccgg

SEQ ID NO: 1699 - DNA, 23 bp, Artificial Sequence
  sgRNA
cagccacgatcggttccggccgg

SEQ ID NO: 1700 - DNA, 23 bp, Artificial Sequence
  sgRNA
agccacgatcggttccggccggg

SEQ ID NO: 1701 - DNA, 23 bp, Artificial Sequence
  sgRNA
ggttccggccgggacaccgccgg

SEQ ID NO: 1702 - DNA, 23 bp, Artificial Sequence
  sgRNA
gttccggccgggacaccgccggg

SEQ ID NO: 1703 - DNA, 23 bp, Artificial Sequence
  sgRNA
ttccggccgggacaccgccgggg

SEQ ID NO: 1704 - DNA, 23 bp, Artificial Sequence
  sgRNA
tccggccgggacaccgccggggg

SEQ ID NO: 1705 - DNA, 23 bp, Artificial Sequence
  sgRNA
ggccgggacaccgccgggggagg

SEQ ID NO: 1706 - DNA, 23 bp, Artificial Sequence
  sgRNA
gccgggacaccgccgggggaggg

SEQ ID NO: 1707 - DNA, 23 bp, Artificial Sequence
  sgRNA
ccgggacaccgccgggggagggg

SEQ ID NO: 1708 - DNA, 23 bp, Artificial Sequence
  sgRNA
ggacaccgccgggggaggggcgg

SEQ ID NO: 1709 - DNA, 23 bp, Artificial Sequence
  sgRNA
gacaccgccgggggaggggcggg

SEQ ID NO: 1710 - DNA, 23 bp, Artificial Sequence
  sgRNA
acaccgccgggggaggggcgggg

SEQ ID NO: 1711 - DNA, 23 bp, Artificial Sequence
  sgRNA
caccgccgggggaggggcggggg

SEQ ID NO: 1712 - DNA, 23 bp, Artificial Sequence
  sgRNA
ccgggggaggggcgggggcccgg

SEQ ID NO: 1713 - DNA, 23 bp, Artificial Sequence
  sgRNA
ggggaggggcgggggcccggcgg

SEQ ID NO: 1714 - DNA, 23 bp, Artificial Sequence
  sgRNA
gaggggcgggggcccggcggtgg

SEQ ID NO: 1715 - DNA, 23 bp, Artificial Sequence
  sgRNA
gggcccggcggtggccaacccgg

SEQ ID NO: 1716 - DNA, 23 bp, Artificial Sequence
  sgRNA
ggcccggcggtggccaacccggg

SEQ ID NO: 1717 - DNA, 23 bp, Artificial Sequence
  sgRNA
gtggccaacccgggcccgcgcgg

SEQ ID NO: 1718 - DNA, 23 bp, Artificial Sequence
  sgRNA
aacccgggcccgcgcggagctgg

SEQ ID NO: 1719 - DNA, 23 bp, Artificial Sequence
  sgRNA
ccgggcccgcgcggagctggtgg

SEQ ID NO: 1720 - DNA, 23 bp, Artificial Sequence
  sgRNA
cgggcccgcgcggagctggtggg

SEQ ID NO: 1721 - DNA, 23 bp, Artificial Sequence
  sgRNA
gggcccgcgcggagctggtgggg

SEQ ID NO: 1722 - DNA, 23 bp, Artificial Sequence
  sgRNA
gcgcggagctggtggggcgccgg

SEQ ID NO: 1723 - DNA, 23 bp, Artificial Sequence
  sgRNA
cggagctggtggggcgccggcgg

SEQ ID NO: 1724 - DNA, 23 bp, Artificial Sequence
  sgRNA
ggagctggtggggcgccggcggg

SEQ ID NO: 1725 - DNA, 23 bp, Artificial Sequence
  sgRNA
atatttccagcttctcacaaagg

SEQ ID NO: 1726 - DNA, 23 bp, Artificial Sequence
  sgRNA
tctcacaaaggcaactctccagg

SEQ ID NO: 1727 - DNA, 23 bp, Artificial Sequence
  sgRNA
aatccctctgcgtgtgcccttgg

SEQ ID NO: 1728 - DNA, 23 bp, Artificial Sequence
  sgRNA
gcacttctggaagtgcaagccgg

SEQ ID NO: 1729 - DNA, 23 bp, Artificial Sequence
  sgRNA
ggaagtgcaagccggtagcgcgg

SEQ ID NO: 1730 - DNA, 23 bp, Artificial Sequence
  sgRNA
agtgcaagccggtagcgcggcgg

SEQ ID NO: 1731 - DNA, 23 bp, Artificial Sequence
  sgRNA
gtgcaagccggtagcgcggcggg

SEQ ID NO: 1732 - DNA, 23 bp, Artificial Sequence
  sgRNA
agccggtagcgcggcgggccagg

SEQ ID NO: 1733 - DNA, 23 bp, Artificial Sequence
  sgRNA
gccggtagcgcggcgggccaggg

SEQ ID NO: 1734 - DNA, 23 bp, Artificial Sequence
  sgRNA
ccagggatacagccaagtcccgg

SEQ ID NO: 1735 - DNA, 23 bp, Artificial Sequence
  sgRNA
cagggatacagccaagtcccggg

SEQ ID NO: 1736 - DNA, 23 bp, Artificial Sequence
  sgRNA
gtcccgggacgtgccagctgcgg

SEQ ID NO: 1737 - DNA, 23 bp, Artificial Sequence
  sgRNA
ccagctgcggtaactgaagccgg

SEQ ID NO: 1738 - DNA, 23 bp, Artificial Sequence
  sgRNA
cagctgcggtaactgaagccggg

SEQ ID NO: 1739 - DNA, 23 bp, Artificial Sequence
  sgRNA
cggtaactgaagccgggtcccgg

SEQ ID NO: 1740 - DNA, 23 bp, Artificial Sequence
  sgRNA
ggtaactgaagccgggtcccggg

SEQ ID NO: 1741 - DNA, 23 bp, Artificial Sequence
  sgRNA
aactgaagccgggtcccgggcgg

SEQ ID NO: 1742 - DNA, 23 bp, Artificial Sequence
  sgRNA
actgaagccgggtcccgggcggg

SEQ ID NO: 1743 - DNA, 23 bp, Artificial Sequence
  sgRNA
gaagccgggtcccgggcgggcgg

SEQ ID NO: 1744 - DNA, 23 bp, Artificial Sequence
  sgRNA
aagccgggtcccgggcgggcggg

SEQ ID NO: 1745 - DNA, 23 bp, Artificial Sequence
  sgRNA
agccgggtcccgggcgggcgggg

SEQ ID NO: 1746 - DNA, 23 bp, Artificial Sequence
  sgRNA
gccgggtcccgggcgggcggggg

SEQ ID NO: 1747 - DNA, 23 bp, Artificial Sequence
  sgRNA
cccgggcgggcgggggtaccagg

SEQ ID NO: 1748 - DNA, 23 bp, Artificial Sequence
  sgRNA
ccgggcgggcgggggtaccaggg

SEQ ID NO: 1749 - DNA, 23 bp, Artificial Sequence
  sgRNA
cgggcgggggtaccagggacagg

SEQ ID NO: 1750 - DNA, 23 bp, Artificial Sequence
  sgRNA
accagggacaggagtagccttgg

SEQ ID NO: 1751 - DNA, 23 bp, Artificial Sequence
  sgRNA
acaggagtagccttggaaagagg

SEQ ID NO: 1752 - DNA, 23 bp, Artificial Sequence
  sgRNA
agtagccttggaaagaggagagg

SEQ ID NO: 1753 - DNA, 23 bp, Artificial Sequence
  sgRNA
gtagccttggaaagaggagaggg

SEQ ID NO: 1754 - DNA, 23 bp, Artificial Sequence
  sgRNA
ggcctcctcccacgaccgtccgg

SEQ ID NO: 1755 - DNA, 23 bp, Artificial Sequence
  sgRNA
ccggatcaccgcctctccgccgg

SEQ ID NO: 1756 - DNA, 23 bp, Artificial Sequence
  sgRNA
cgcctctccgccggcacccccgg

SEQ ID NO: 1757 - DNA, 23 bp, Artificial Sequence
  sgRNA
gcctctccgccggcacccccggg

SEQ ID NO: 1758 - DNA, 23 bp, Artificial Sequence
  sgRNA
cctctccgccggcacccccgggg

SEQ ID NO: 1759 - DNA, 23 bp, Artificial Sequence
  sgRNA
ccggggcccatgccgcgaacagg

SEQ ID NO: 1760 - DNA, 23 bp, Artificial Sequence
  sgRNA
ggcccatgccgcgaacaggccgg

SEQ ID NO: 1761 - DNA, 23 bp, Artificial Sequence
  sgRNA
atgccgcgaacaggccggcgagg

SEQ ID NO: 1762 - DNA, 23 bp, Artificial Sequence
  sgRNA
cgcgaacaggccggcgaggctgg

SEQ ID NO: 1763 - DNA, 23 bp, Artificial Sequence
  sgRNA
acaggccggcgaggctggcaagg

SEQ ID NO: 1764 - DNA, 23 bp, Artificial Sequence
  sgRNA
ggcgaggctggcaaggtgcccgg

SEQ ID NO: 1765 - DNA, 23 bp, Artificial Sequence
  sgRNA
gcgaggctggcaaggtgcccggg

SEQ ID NO: 1766 - DNA, 23 bp, Artificial Sequence
  sgRNA
gctggcaaggtgcccgggcccgg

SEQ ID NO: 1767 - DNA, 23 bp, Artificial Sequence
  sgRNA
ctggcaaggtgcccgggcccggg

SEQ ID NO: 1768 - DNA, 23 bp, Artificial Sequence
  sgRNA
tggcaaggtgcccgggcccgggg

SEQ ID NO: 1769 - DNA, 23 bp, Artificial Sequence
  sgRNA
caaggtgcccgggcccggggcgg

SEQ ID NO: 1770 - DNA, 23 bp, Artificial Sequence
  sgRNA
ccgggcccggggcggaaagcagg

SEQ ID NO: 1771 - DNA, 23 bp, Artificial Sequence
  sgRNA
aaagcaggaagtcgatcccgcgg

SEQ ID NO: 1772 - DNA, 23 bp, Artificial Sequence
  sgRNA
aagcaggaagtcgatcccgcggg

SEQ ID NO: 1773 - DNA, 23 bp, Artificial Sequence
  sgRNA
ggaagtcgatcccgcgggcgcgg

SEQ ID NO: 1774 - DNA, 23 bp, Artificial Sequence
  sgRNA
cgatcccgcgggcgcggcccagg

SEQ ID NO: 1775 - DNA, 23 bp, Artificial Sequence
  sgRNA
gatcccgcgggcgcggcccaggg

SEQ ID NO: 1776 - DNA, 23 bp, Artificial Sequence
  sgRNA
cgcgggcgcggcccagggtgcgg

SEQ ID NO: 1777 - DNA, 23 bp, Artificial Sequence
  sgRNA
gcggcgctgcagatgcagcacgg

SEQ ID NO: 1778 - DNA, 23 bp, Artificial Sequence
  sgRNA
cggcgctgcagatgcagcacggg

SEQ ID NO: 1779 - DNA, 23 bp, Artificial Sequence
  sgRNA
ggcgctgcagatgcagcacgggg

SEQ ID NO: 1780 - DNA, 23 bp, Artificial Sequence
  sgRNA
gcagatgcagcacggggtcgcgg

SEQ ID NO: 1781 - DNA, 23 bp, Artificial Sequence
  sgRNA
cagatgcagcacggggtcgcggg

SEQ ID NO: 1782 - DNA, 23 bp, Artificial Sequence
  sgRNA
agatgcagcacggggtcgcgggg

SEQ ID NO: 1783 - DNA, 23 bp, Artificial Sequence
  sgRNA
tgcagcacggggtcgcggggcgg

SEQ ID NO: 1784 - DNA, 23 bp, Artificial Sequence
  sgRNA
gcagcacggggtcgcggggcggg

SEQ ID NO: 1785 - DNA, 23 bp, Artificial Sequence
  sgRNA
ggggcgggcgcccagtgcaccgg

SEQ ID NO: 1786 - DNA, 23 bp, Artificial Sequence
  sgRNA
gcgggcgcccagtgcaccggagg

SEQ ID NO: 1787 - DNA, 23 bp, Artificial Sequence
  sgRNA
ggcgcccagtgcaccggaggagg

SEQ ID NO: 1788 - DNA, 23 bp, Artificial Sequence
  sgRNA
caccggaggaggtgagcgccagg

SEQ ID NO: 1789 - DNA, 23 bp, Artificial Sequence
  sgRNA
tgagcgccaggtcgccttcgcgg

SEQ ID NO: 1790 - DNA, 23 bp, Artificial Sequence
  sgRNA
gccaggtcgccttcgcggcccgg

SEQ ID NO: 1791 - DNA, 23 bp, Artificial Sequence
  sgRNA
ccaggtcgccttcgcggcccggg

SEQ ID NO: 1792 - DNA, 23 bp, Artificial Sequence
  sgRNA
caggtcgccttcgcggcccgggg

SEQ ID NO: 1793 - DNA, 23 bp, Artificial Sequence
  sgRNA
ccttcgcggcccggggacacagg

SEQ ID NO: 1794 - DNA, 23 bp, Artificial Sequence
  sgRNA
cgcggcccggggacacaggcagg

SEQ ID NO: 1795 - DNA, 23 bp, Artificial Sequence
  sgRNA
gcggcccggggacacaggcaggg

SEQ ID NO: 1796 - DNA, 23 bp, Artificial Sequence
  sgRNA
cggggacacaggcagggacgcgg

SEQ ID NO: 1797 - DNA, 23 bp, Artificial Sequence
  sgRNA
ggggacacaggcagggacgcggg

SEQ ID NO: 1798 - DNA, 23 bp, Artificial Sequence
  sgRNA
cagggacgcgggagctgatgcgg

SEQ ID NO: 1799 - DNA, 23 bp, Artificial Sequence
  sgRNA
gacgcgggagctgatgcggctgg

SEQ ID NO: 1800 - DNA, 23 bp, Artificial Sequence
  sgRNA
gggagctgatgcggctggaccgg

SEQ ID NO: 1801 - DNA, 23 bp, Artificial Sequence
  sgRNA
gctgatgcggctggaccggccgg

SEQ ID NO: 1802 - DNA, 23 bp, Artificial Sequence
  sgRNA
ctgatgcggctggaccggccggg

SEQ ID NO: 1803 - DNA, 23 bp, Artificial Sequence
  sgRNA
tgatgcggctggaccggccgggg

SEQ ID NO: 1804 - DNA, 23 bp, Artificial Sequence
  sgRNA
gccggggaaacagtattttctgg

SEQ ID NO: 1805 - DNA, 23 bp, Artificial Sequence
  sgRNA
gggaaacagtattttctggaagg

SEQ ID NO: 1806 - DNA, 23 bp, Artificial Sequence
  sgRNA
ggaaacagtattttctggaaggg

SEQ ID NO: 1807 - DNA, 23 bp, Artificial Sequence
  sgRNA
gcggtccaggatcctgcacatgg

SEQ ID NO: 1808 - DNA, 23 bp, Artificial Sequence
  sgRNA
atcctgcacatggcgctgaccgg

SEQ ID NO: 1809 - DNA, 23 bp, Artificial Sequence
  sgRNA
tcctgcacatggcgctgaccggg

SEQ ID NO: 1810 - DNA, 23 bp, Artificial Sequence
  sgRNA
cctgcacatggcgctgaccgggg

SEQ ID NO: 1811 - DNA, 23 bp, Artificial Sequence
  sgRNA
ggcctcagacccctctgcagagg

SEQ ID NO: 1812 - DNA, 23 bp, Artificial Sequence
  sgRNA
agacccctctgcagaggcagagg

SEQ ID NO: 1813 - DNA, 23 bp, Artificial Sequence
  sgRNA
tctgcagaggcagaggccaacgg

SEQ ID NO: 1814 - DNA, 23 bp, Artificial Sequence
  sgRNA
ctgcagaggcagaggccaacggg

SEQ ID NO: 1815 - DNA, 23 bp, Artificial Sequence
  sgRNA
tgcagaggcagaggccaacgggg

SEQ ID NO: 1816 - DNA, 23 bp, Artificial Sequence
  sgRNA
gggagaagccctttctgctgcgg

SEQ ID NO: 1817 - DNA, 23 bp, Artificial Sequence
  sgRNA
ggagaagccctttctgctgcggg

SEQ ID NO: 1818 - DNA, 23 bp, Artificial Sequence
  sgRNA
gcgggcattgcagatcgcgctgg

SEQ ID NO: 1819 - DNA, 23 bp, Artificial Sequence
  sgRNA
ggcattgcagatcgcgctggtgg

SEQ ID NO: 1820 - DNA, 23 bp, Artificial Sequence
  sgRNA
cgctggtggtctccctctactgg

SEQ ID NO: 1821 - DNA, 23 bp, Artificial Sequence
  sgRNA
gctggtggtctccctctactggg

SEQ ID NO: 1822 - DNA, 23 bp, Artificial Sequence
  sgRNA
ctgggtcacctccatctccatgg

SEQ ID NO: 1823 - DNA, 23 bp, Artificial Sequence
  sgRNA
gttccttaataagtacctgctgg

SEQ ID NO: 1824 - DNA, 23 bp, Artificial Sequence
  sgRNA
tgctggacagcccctccctgcgg

SEQ ID NO: 1825 - DNA, 23 bp, Artificial Sequence
  sgRNA
ggacagcccctccctgcggctgg

SEQ ID NO: 1826 - DNA, 23 bp, Artificial Sequence
  sgRNA
cgtcaccttctaccagtgcctgg

SEQ ID NO: 1827 - DNA, 23 bp, Artificial Sequence
  sgRNA
gtgaccacgctgctgtgcaaagg

SEQ ID NO: 1828 - DNA, 23 bp, Artificial Sequence
  sgRNA
gtgcaaaggcctcagcgctctgg

SEQ ID NO: 1829 - DNA, 23 bp, Artificial Sequence
  sgRNA
gctctggccgcctgctgccctgg

SEQ ID NO: 1830 - DNA, 23 bp, Artificial Sequence
  sgRNA
cgcctgctgccctggtgccgtgg

SEQ ID NO: 1831 - DNA, 23 bp, Artificial Sequence
  sgRNA
ggacttccccagcttgcgcctgg

SEQ ID NO: 1832 - DNA, 23 bp, Artificial Sequence
  sgRNA
ccagcttgcgcctggacctcagg

SEQ ID NO: 1833 - DNA, 23 bp, Artificial Sequence
  sgRNA
cagcttgcgcctggacctcaggg

SEQ ID NO: 1834 - DNA, 23 bp, Artificial Sequence
  sgRNA
cttgcgcctggacctcagggtgg

SEQ ID NO: 1835 - DNA, 23 bp, Artificial Sequence
  sgRNA
ccgcagcgtcctgcccctgtcgg

SEQ ID NO: 1836 - DNA, 23 bp, Artificial Sequence
  sgRNA
cagcgtcctgcccctgtcggtgg

SEQ ID NO: 1837 - DNA, 23 bp, Artificial Sequence
  sgRNA
cccctgtcggtggtcttcatcgg

SEQ ID NO: 1838 - DNA, 23 bp, Artificial Sequence
  sgRNA
aacctctgcctcaagtacgtcgg

SEQ ID NO: 1839 - DNA, 23 bp, Artificial Sequence
  sgRNA
ctgcctcaagtacgtcggtgtgg

SEQ ID NO: 1840 - DNA, 23 bp, Artificial Sequence
  sgRNA
cggtgtggccttctacaatgtgg

SEQ ID NO: 1841 - DNA, 23 bp, Artificial Sequence
  sgRNA
ggtgtggccttctacaatgtggg

SEQ ID NO: 1842 - DNA, 23 bp, Artificial Sequence
  sgRNA
ttctatgccctgctcacctgcgg

SEQ ID NO: 1843 - DNA, 23 bp, Artificial Sequence
  sgRNA
caccggaggaggtgagcgccagg

SEQ ID NO: 1844 - DNA, 23 bp, Artificial Sequence
  sgRNA
tgagcgccaggtcgccttcgcgg

SEQ ID NO: 1845 - DNA, 23 bp, Artificial Sequence
  sgRNA
gccaggtcgccttcgcggcccgg

SEQ ID NO: 1846 - DNA, 23 bp, Artificial Sequence
  sgRNA
ccaggtcgccttcgcggcccggg

SEQ ID NO: 1847 - DNA, 23 bp, Artificial Sequence
  sgRNA
caggtcgccttcgcggcccgggg

SEQ ID NO: 1848 - DNA, 23 bp, Artificial Sequence
  sgRNA
ccttcgcggcccggggacacagg

SEQ ID NO: 1849 - DNA, 23 bp, Artificial Sequence
  sgRNA
cgcggcccggggacacaggcagg

SEQ ID NO: 1850 - DNA, 23 bp, Artificial Sequence
  sgRNA
gcggcccggggacacaggcaggg

SEQ ID NO: 1851 - DNA, 23 bp, Artificial Sequence
  sgRNA
cggggacacaggcagggacgcgg

SEQ ID NO: 1852 - DNA, 23 bp, Artificial Sequence
  sgRNA
ggggacacaggcagggacgcggg

SEQ ID NO: 1853 - DNA, 23 bp, Artificial Sequence
  sgRNA
cagggacgcgggagctgatgcgg

SEQ ID NO: 1854 - DNA, 23 bp, Artificial Sequence
  sgRNA
gacgcgggagctgatgcggctgg

SEQ ID NO: 1855 - DNA, 23 bp, Artificial Sequence
  sgRNA
gggagctgatgcggctggaccgg

SEQ ID NO: 1856 - DNA, 23 bp, Artificial Sequence
  sgRNA
gctgatgcggctggaccggccgg

SEQ ID NO: 1857 - DNA, 23 bp, Artificial Sequence
  sgRNA
ctgatgcggctggaccggccggg

SEQ ID NO: 1858 - DNA, 23 bp, Artificial Sequence
  sgRNA
tgatgcggctggaccggccgggg

SEQ ID NO: 1859 - DNA, 23 bp, Artificial Sequence
  sgRNA
gccggggaaacagtattttctgg

SEQ ID NO: 1860 - DNA, 23 bp, Artificial Sequence
  sgRNA
gggaaacagtattttctggaagg

SEQ ID NO: 1861 - DNA, 23 bp, Artificial Sequence
  sgRNA
ggaaacagtattttctggaaggg

SEQ ID NO: 1862 - DNA, 23 bp, Artificial Sequence
  sgRNA
gaaacagtattttctggaagggg

SEQ ID NO: 1863 - DNA, 23 bp, Artificial Sequence
  sgRNA
gagatgctgtcttgagcctttgg

SEQ ID NO: 1864 - DNA, 23 bp, Artificial Sequence
  sgRNA
gtcttgagcctttggaatctcgg

SEQ ID NO: 1865 - DNA, 23 bp, Artificial Sequence
  sgRNA
agcctttggaatctcggatccgg

SEQ ID NO: 1866 - DNA, 23 bp, Artificial Sequence
  sgRNA
gcctttggaatctcggatccggg

SEQ ID NO: 1867 - DNA, 23 bp, Artificial Sequence
  sgRNA
ctcggatccgggccgcccagagg

SEQ ID NO: 1868 - DNA, 23 bp, Artificial Sequence
  sgRNA
gccgcccagaggacctcgacagg

SEQ ID NO: 1869 - DNA, 23 bp, Artificial Sequence
  sgRNA
gaggacctcgacaggagcacagg

SEQ ID NO: 1870 - DNA, 23 bp, Artificial Sequence
  sgRNA
aggacctcgacaggagcacaggg

SEQ ID NO: 1871 - DNA, 23 bp, Artificial Sequence
  sgRNA
acctcgacaggagcacagggagg

SEQ ID NO: 1872 - DNA, 23 bp, Artificial Sequence
  sgRNA
gacaaactgaagtccgagagagg

SEQ ID NO: 1873 - DNA, 23 bp, Artificial Sequence
  sgRNA
aaactgaagtccgagagaggcgg

SEQ ID NO: 1874 - DNA, 23 bp, Artificial Sequence
  sgRNA
gaagtccgagagaggcggcgtgg

SEQ ID NO: 1875 - DNA, 23 bp, Artificial Sequence
  sgRNA
gagagaggcggcgtggcctccgg

SEQ ID NO: 1876 - DNA, 23 bp, Artificial Sequence
  sgRNA
ggcggcgtggcctccggcctcgg

SEQ ID NO: 1877 - DNA, 23 bp, Artificial Sequence
  sgRNA
gcggcgtggcctccggcctcggg

SEQ ID NO: 1878 - DNA, 23 bp, Artificial Sequence
  sgRNA
cggcgtggcctccggcctcgggg

SEQ ID NO: 1879 - DNA, 23 bp, Artificial Sequence
  sgRNA
ccggcctcggggagcgctgccgg

SEQ ID NO: 1880 - DNA, 23 bp, Artificial Sequence
  sgRNA
cggcctcggggagcgctgccggg

SEQ ID NO: 1881 - DNA, 23 bp, Artificial Sequence
  sgRNA
ggcctcggggagcgctgccgggg

SEQ ID NO: 1882 - DNA, 23 bp, Artificial Sequence
  sgRNA
gcctcggggagcgctgccggggg

SEQ ID NO: 1883 - DNA, 23 bp, Artificial Sequence
  sgRNA
gggagcgctgccgggggtctcgg

SEQ ID NO: 1884 - DNA, 23 bp, Artificial Sequence
  sgRNA
ggagcgctgccgggggtctcggg

SEQ ID NO: 1885 - DNA, 23 bp, Artificial Sequence
  sgRNA
gctgccgggggtctcgggcttgg

SEQ ID NO: 1886 - DNA, 23 bp, Artificial Sequence
  sgRNA
ctgccgggggtctcgggcttggg

SEQ ID NO: 1887 - DNA, 23 bp, Artificial Sequence
  sgRNA
gggggtctcgggcttgggagagg

SEQ ID NO: 1888 - DNA, 23 bp, Artificial Sequence
  sgRNA
ggggtctcgggcttgggagaggg

SEQ ID NO: 1889 - DNA, 23 bp, Artificial Sequence
  sgRNA
ctcgggcttgggagagggcctgg

SEQ ID NO: 1890 - DNA, 23 bp, Artificial Sequence
  sgRNA
tcgggcttgggagagggcctggg

SEQ ID NO: 1891 - DNA, 23 bp, Artificial Sequence
  sgRNA
cgggcttgggagagggcctgggg

SEQ ID NO: 1892 - DNA, 23 bp, Artificial Sequence
  sgRNA
gggcttgggagagggcctggggg

SEQ ID NO: 1893 - DNA, 23 bp, Artificial Sequence
  sgRNA
cttgggagagggcctgggggcgg

SEQ ID NO: 1894 - DNA, 23 bp, Artificial Sequence
  sgRNA
gggcctgggggcggtgaaaatgg

SEQ ID NO: 1895 - DNA, 23 bp, Artificial Sequence
  sgRNA
ggcctgggggcggtgaaaatggg

SEQ ID NO: 1896 - DNA, 23 bp, Artificial Sequence
  sgRNA
gcctgggggcggtgaaaatgggg

SEQ ID NO: 1897 - DNA, 23 bp, Artificial Sequence
  sgRNA
cctgggggcggtgaaaatggggg

SEQ ID NO: 1898 - DNA, 23 bp, Artificial Sequence
  sgRNA
ctgggggcggtgaaaatgggggg

SEQ ID NO: 1899 - DNA, 23 bp, Artificial Sequence
  sgRNA
ggcggtgaaaatggggggaaagg

SEQ ID NO: 1900 - DNA, 23 bp, Artificial Sequence
  sgRNA
ggtgaaaatggggggaaaggagg

SEQ ID NO: 1901 - DNA, 23 bp, Artificial Sequence
  sgRNA
gtgaaaatggggggaaaggaggg

SEQ ID NO: 1902 - DNA, 23 bp, Artificial Sequence
  sgRNA
tgaaaatggggggaaaggagggg

SEQ ID NO: 1903 - DNA, 23 bp, Artificial Sequence
  sgRNA
aggggaccacaacattgttatgg

SEQ ID NO: 1904 - DNA, 23 bp, Artificial Sequence
  sgRNA
ttgttatggaagagtgagctcgg

SEQ ID NO: 1905 - DNA, 23 bp, Artificial Sequence
  sgRNA
atggaagagtgagctcggattgg

SEQ ID NO: 1906 - DNA, 23 bp, Artificial Sequence
  sgRNA
gagtgagctcggattggcagagg

SEQ ID NO: 1907 - DNA, 23 bp, Artificial Sequence
  sgRNA
agtgagctcggattggcagaggg

SEQ ID NO: 1908 - DNA, 23 bp, Artificial Sequence
  sgRNA
ctcggattggcagagggacgcgg

SEQ ID NO: 1909 - DNA, 23 bp, Artificial Sequence
  sgRNA
tcggattggcagagggacgcggg

SEQ ID NO: 1910 - DNA, 23 bp, Artificial Sequence
  sgRNA
cggattggcagagggacgcgggg

SEQ ID NO: 1911 - DNA, 23 bp, Artificial Sequence
  sgRNA
ggggctgcaacgcgagtctccgg

SEQ ID NO: 1912 - DNA, 23 bp, Artificial Sequence
  sgRNA
gctgcaacgcgagtctccggagg

SEQ ID NO: 1913 - DNA, 23 bp, Artificial Sequence
  sgRNA
gcaacgcgagtctccggaggtgg

SEQ ID NO: 1914 - DNA, 23 bp, Artificial Sequence
  sgRNA
acgcgagtctccggaggtggagg

SEQ ID NO: 1915 - DNA, 23 bp, Artificial Sequence
  sgRNA
cgcgagtctccggaggtggaggg

SEQ ID NO: 1916 - DNA, 23 bp, Artificial Sequence
  sgRNA
gcgagtctccggaggtggagggg

SEQ ID NO: 1917 - DNA, 23 bp, Artificial Sequence
  sgRNA
ctccggaggtggaggggtccagg

SEQ ID NO: 1918 - DNA, 23 bp, Artificial Sequence
  sgRNA
caggctgatgtagcgccgcccgg

SEQ ID NO: 1919 - DNA, 23 bp, Artificial Sequence
  sgRNA
aggctgatgtagcgccgcccggg

SEQ ID NO: 1920 - DNA, 23 bp, Artificial Sequence
  sgRNA
atgtagcgccgcccgggtcctgg

SEQ ID NO: 1921 - DNA, 23 bp, Artificial Sequence
  sgRNA
tgtagcgccgcccgggtcctggg

SEQ ID NO: 1922 - DNA, 23 bp, Artificial Sequence
  sgRNA
gcgccgcccgggtcctgggtcgg

SEQ ID NO: 1923 - DNA, 23 bp, Artificial Sequence
  sgRNA
cgccgcccgggtcctgggtcggg

SEQ ID NO: 1924 - DNA, 23 bp, Artificial Sequence
  sgRNA
gccgcccgggtcctgggtcgggg

SEQ ID NO: 1925 - DNA, 23 bp, Artificial Sequence
  sgRNA
cgggtcctgggtcggggttccgg

SEQ ID NO: 1926 - DNA, 23 bp, Artificial Sequence
  sgRNA
gggtcctgggtcggggttccggg

SEQ ID NO: 1927 - DNA, 23 bp, Artificial Sequence
  sgRNA
tgggtcggggttccgggaagtgg

SEQ ID NO: 1928 - DNA, 23 bp, Artificial Sequence
  sgRNA
cgagccaagcctagccaagtcgg

SEQ ID NO: 1929 - DNA, 23 bp, Artificial Sequence
  sgRNA
gagccaagcctagccaagtcggg

SEQ ID NO: 1930 - DNA, 23 bp, Artificial Sequence
  sgRNA
agccaagcctagccaagtcgggg

SEQ ID NO: 1931 - DNA, 23 bp, Artificial Sequence
  sgRNA
gccaagcctagccaagtcggggg

SEQ ID NO: 1932 - DNA, 23 bp, Artificial Sequence
  sgRNA
agcctagccaagtcgggggacgg

SEQ ID NO: 1933 - DNA, 23 bp, Artificial Sequence
  sgRNA
ctagccaagtcgggggacggagg

SEQ ID NO: 1934 - DNA, 23 bp, Artificial Sequence
  sgRNA
aagtcgggggacggaggctccgg

SEQ ID NO: 1935 - DNA, 23 bp, Artificial Sequence
  sgRNA
agtcgggggacggaggctccggg

SEQ ID NO: 1936 - DNA, 23 bp, Artificial Sequence
  sgRNA
gtcgggggacggaggctccgggg

SEQ ID NO: 1937 - DNA, 23 bp, Artificial Sequence
  sgRNA
gggggacggaggctccggggcgg

SEQ ID NO: 1938 - DNA, 23 bp, Artificial Sequence
  sgRNA
gacggaggctccggggcggacgg

SEQ ID NO: 1939 - DNA, 23 bp, Artificial Sequence
  sgRNA
ctccggggcggacggagctgagg

SEQ ID NO: 1940 - DNA, 23 bp, Artificial Sequence
  sgRNA
tccggggcggacggagctgaggg

SEQ ID NO: 1941 - DNA, 23 bp, Artificial Sequence
  sgRNA
ggggcggacggagctgagggtgg

SEQ ID NO: 1942 - DNA, 23 bp, Artificial Sequence
  sgRNA
gggcggacggagctgagggtggg

SEQ ID NO: 1943 - DNA, 23 bp, Artificial Sequence
  sgRNA
ggacggagctgagggtgggcagg

SEQ ID NO: 1944 - DNA, 23 bp, Artificial Sequence
  sgRNA
gagctgagggtgggcaggcgagg

SEQ ID NO: 1945 - DNA, 23 bp, Artificial Sequence
  sgRNA
gggtgggcaggcgaggttgatgg

SEQ ID NO: 1946 - DNA, 23 bp, Artificial Sequence
  sgRNA
gaggttgatggagcccttccagg

SEQ ID NO: 1947 - DNA, 23 bp, Artificial Sequence
  sgRNA
atggagcccttccaggaagcagg

SEQ ID NO: 1948 - DNA, 23 bp, Artificial Sequence
  sgRNA
tggagcccttccaggaagcaggg

SEQ ID NO: 1949 - DNA, 23 bp, Artificial Sequence
  sgRNA
cccttccaggaagcagggcgagg

SEQ ID NO: 1950 - DNA, 23 bp, Artificial Sequence
  sgRNA
caagcacccagaaaaacctgtgg

SEQ ID NO: 1951 - DNA, 23 bp, Artificial Sequence
  sgRNA
agaaaaacctgtggctgccgagg

SEQ ID NO: 1952 - DNA, 23 bp, Artificial Sequence
  sgRNA
ccgaggtcccccgccagcagcgg

SEQ ID NO: 1953 - DNA, 23 bp, Artificial Sequence
  sgRNA
cgaggtcccccgccagcagcggg

SEQ ID NO: 1954 - DNA, 23 bp, Artificial Sequence
  sgRNA
cccccgccagcagcgggcagcgg

SEQ ID NO: 1955 - DNA, 23 bp, Artificial Sequence
  sgRNA
agcagcgggcagcggagcgcagg

SEQ ID NO: 1956 - DNA, 23 bp, Artificial Sequence
  sgRNA
gcagcgggcagcggagcgcaggg

SEQ ID NO: 1957 - DNA, 23 bp, Artificial Sequence
  sgRNA
cagcgggcagcggagcgcagggg

SEQ ID NO: 1958 - DNA, 23 bp, Artificial Sequence
  sgRNA
cgggcagcggagcgcaggggcgg

SEQ ID NO: 1959 - DNA, 23 bp, Artificial Sequence
  sgRNA
gggcagcggagcgcaggggcggg

SEQ ID NO: 1960 - DNA, 23 bp, Artificial Sequence
  sgRNA
ggcagcggagcgcaggggcgggg

SEQ ID NO: 1961 - DNA, 23 bp, Artificial Sequence
  sgRNA
gcggagcgcaggggcggggctgg

SEQ ID NO: 1962 - DNA, 23 bp, Artificial Sequence
  sgRNA
cggagcgcaggggcggggctggg

SEQ ID NO: 1963 - DNA, 23 bp, Artificial Sequence
  sgRNA
ggagcgcaggggcggggctgggg

SEQ ID NO: 1964 - DNA, 23 bp, Artificial Sequence
  sgRNA
gcaggggcggggctggggactgg

SEQ ID NO: 1965 - DNA, 23 bp, Artificial Sequence
  sgRNA
actggcgaactccgcctctctgg

SEQ ID NO: 1966 - DNA, 23 bp, Artificial Sequence
  sgRNA
ctggcgaactccgcctctctggg

SEQ ID NO: 1967 - DNA, 23 bp, Artificial Sequence
  sgRNA
tggcgaactccgcctctctgggg

SEQ ID NO: 1968 - DNA, 23 bp, Artificial Sequence
  sgRNA
tctctggggctgtcgctttaagg

SEQ ID NO: 1969 - DNA, 23 bp, Artificial Sequence
  sgRNA
ctctggggctgtcgctttaaggg

SEQ ID NO: 1970 - DNA, 23 bp, Artificial Sequence
  sgRNA
gggctgtcgctttaagggcaagg

SEQ ID NO: 1971 - DNA, 23 bp, Artificial Sequence
  sgRNA
ctgtcgctttaagggcaaggcgg

SEQ ID NO: 1972 - DNA, 23 bp, Artificial Sequence
  sgRNA
tgtcgctttaagggcaaggcggg

SEQ ID NO: 1973 - DNA, 23 bp, Artificial Sequence
  sgRNA
gtcgctttaagggcaaggcgggg

SEQ ID NO: 1974 - DNA, 23 bp, Artificial Sequence
  sgRNA
taagggcaaggcggggcgtgcgg

SEQ ID NO: 1975 - DNA, 23 bp, Artificial Sequence
  sgRNA
aagggcaaggcggggcgtgcggg

SEQ ID NO: 1976 - DNA, 23 bp, Artificial Sequence
  sgRNA
cggggcgtgcgggccctttaagg

SEQ ID NO: 1977 - DNA, 23 bp, Artificial Sequence
  sgRNA
gcgggccctttaaggccacgtgg

SEQ ID NO: 1978 - DNA, 23 bp, Artificial Sequence
  sgRNA
cgggccctttaaggccacgtggg

SEQ ID NO: 1979 - DNA, 23 bp, Artificial Sequence
  sgRNA
gggccctttaaggccacgtgggg

SEQ ID NO: 1980 - DNA, 23 bp, Artificial Sequence
  sgRNA
ggccctttaaggccacgtggggg

SEQ ID NO: 1981 - DNA, 23 bp, Artificial Sequence
  sgRNA
aggccacgtgggggcgtgtcagg

SEQ ID NO: 1982 - DNA, 23 bp, Artificial Sequence
  sgRNA
gcgtgtcaggaagtgagtccagg

SEQ ID NO: 1983 - DNA, 23 bp, Artificial Sequence
  sgRNA
cgtgtcaggaagtgagtccaggg

SEQ ID NO: 1984 - DNA, 23 bp, Artificial Sequence
  sgRNA
tgagtccagggcccgcctcccgg

SEQ ID NO: 1985 - DNA, 23 bp, Artificial Sequence
  sgRNA
gagtccagggcccgcctcccggg

SEQ ID NO: 1986 - DNA, 23 bp, Artificial Sequence
  sgRNA
agtccagggcccgcctcccgggg

SEQ ID NO: 1987 - DNA, 23 bp, Artificial Sequence
  sgRNA
gggcccgcctcccggggagtcgg

SEQ ID NO: 1988 - DNA, 23 bp, Artificial Sequence
  sgRNA
gcctcccggggagtcggcctcgg

SEQ ID NO: 1989 - DNA, 23 bp, Artificial Sequence
  sgRNA
gggagtcggcctcggatgtccgg

SEQ ID NO: 1990 - DNA, 23 bp, Artificial Sequence
  sgRNA
agtcggcctcggatgtccggagg

SEQ ID NO: 1991 - DNA, 23 bp, Artificial Sequence
  sgRNA
ctcggatgtccggaggctcctgg

SEQ ID NO: 1992 - DNA, 23 bp, Artificial Sequence
  sgRNA
tcggatgtccggaggctcctggg

SEQ ID NO: 1993 - DNA, 23 bp, Artificial Sequence
  sgRNA
cggaggctcctgggctgagccgg

SEQ ID NO: 1994 - DNA, 23 bp, Artificial Sequence
  sgRNA
gctgagccggcgacagagcccgg

SEQ ID NO: 1995 - DNA, 23 bp, Artificial Sequence
  sgRNA
ctgagccggcgacagagcccggg

SEQ ID NO: 1996 - DNA, 23 bp, Artificial Sequence
  sgRNA
gccggcgacagagcccgggaagg

SEQ ID NO: 1997 - DNA, 23 bp, Artificial Sequence
  sgRNA
cccgggaaggcagcgagacgtgg

SEQ ID NO: 1998 - DNA, 23 bp, Artificial Sequence
  sgRNA
ccgggaaggcagcgagacgtggg

SEQ ID NO: 1999 - DNA, 23 bp, Artificial Sequence
  sgRNA
aggcagcgagacgtgggcgccgg

SEQ ID NO: 2000 - DNA, 23 bp, Artificial Sequence
  sgRNA
gccctccctccagccgcgcccgg

SEQ ID NO: 2001 - DNA, 23 bp, Artificial Sequence
  sgRNA
ctccagccgcgcccggcctccgg

SEQ ID NO: 2002 - DNA, 23 bp, Artificial Sequence
  sgRNA
agccgcccatgacgccctctcgg

SEQ ID NO: 2003 - DNA, 23 bp, Artificial Sequence
  sgRNA
ctctgcgacccctccctgttagg

SEQ ID NO: 2004 - DNA, 23 bp, Artificial Sequence
  sgRNA
ccagcctcttctcccctcacagg

SEQ ID NO: 2005 - DNA, 23 bp, Artificial Sequence
  sgRNA
ctcacaggtcttctctgtcctgg

SEQ ID NO: 2006 - DNA, 23 bp, Artificial Sequence
  sgRNA
gtcttgtctcagagccccctcgg

SEQ ID NO: 2007 - DNA, 23 bp, Artificial Sequence
  sgRNA
tcttgtctcagagccccctcggg

SEQ ID NO: 2008 - DNA, 23 bp, Artificial Sequence
  sgRNA
cttgtctcagagccccctcgggg

SEQ ID NO: 2009 - DNA, 23 bp, Artificial Sequence
  sgRNA
gtctcagagccccctcggggtgg

SEQ ID NO: 2010 - DNA, 23 bp, Artificial Sequence
  sgRNA
tctcagagccccctcggggtggg

SEQ ID NO: 2011 - DNA, 23 bp, Artificial Sequence
  sgRNA
agccccctcggggtgggagtagg

SEQ ID NO: 2012 - DNA, 23 bp, Artificial Sequence
  sgRNA
ctcggggtgggagtaggttgtgg

SEQ ID NO: 2013 - DNA, 23 bp, Artificial Sequence
  sgRNA
aggttgtggagcagcacaactgg

SEQ ID NO: 2014 - DNA, 23 bp, Artificial Sequence
  sgRNA
ggttgtggagcagcacaactggg

SEQ ID NO: 2015 - DNA, 23 bp, Artificial Sequence
  sgRNA
gcagaacttctcaatccatgagg

SEQ ID NO: 2016 - DNA, 23 bp, Artificial Sequence
  sgRNA
ttctcaatccatgaggacaatgg

SEQ ID NO: 2017 - DNA, 23 bp, Artificial Sequence
  sgRNA
tctcaatccatgaggacaatggg

SEQ ID NO: 2018 - DNA, 23 bp, Artificial Sequence
  sgRNA
ctcaatccatgaggacaatgggg

SEQ ID NO: 2019 - DNA, 23 bp, Artificial Sequence
  sgRNA
aatccatgaggacaatggggagg

SEQ ID NO: 2020 - DNA, 23 bp, Artificial Sequence
  sgRNA
aggacaatggggaggcctttagg

SEQ ID NO: 2021 - DNA, 23 bp, Artificial Sequence
  sgRNA
ggccagcccacatgtgacaatgg

SEQ ID NO: 2022 - DNA, 23 bp, Artificial Sequence
  sgRNA
cagcccacatgtgacaatggagg

SEQ ID NO: 2023 - DNA, 23 bp, Artificial Sequence
  sgRNA
agcccacatgtgacaatggaggg

SEQ ID NO: 2024 - DNA, 23 bp, Artificial Sequence
  sgRNA
catgtgacaatggagggctgcgg

SEQ ID NO: 2025 - DNA, 23 bp, Artificial Sequence
  sgRNA
ggagggctgcggcttccttgcgg

SEQ ID NO: 2026 - DNA, 23 bp, Artificial Sequence
  sgRNA
cacaagtgagctcactgccctgg

SEQ ID NO: 2027 - DNA, 23 bp, Artificial Sequence
  sgRNA
agctcactgccctggactccagg

SEQ ID NO: 2028 - DNA, 23 bp, Artificial Sequence
  sgRNA
gctcactgccctggactccaggg

SEQ ID NO: 2029 - DNA, 23 bp, Artificial Sequence
  sgRNA
actccagggaatcagagttctgg

SEQ ID NO: 2030 - DNA, 23 bp, Artificial Sequence
  sgRNA
gggaatcagagttctggccgcgg

SEQ ID NO: 2031 - DNA, 23 bp, Artificial Sequence
  sgRNA
ggaatcagagttctggccgcggg

SEQ ID NO: 2032 - DNA, 23 bp, Artificial Sequence
  sgRNA
gaatcagagttctggccgcgggg

SEQ ID NO: 2033 - DNA, 23 bp, Artificial Sequence
  sgRNA
gctcctctgctaccatgaatagg

SEQ ID NO: 2034 - DNA, 23 bp, Artificial Sequence
  sgRNA
ctcctctgctaccatgaataggg

SEQ ID NO: 2035 - DNA, 23 bp, Artificial Sequence
  sgRNA
tgaatagggcccctctgaagcgg

SEQ ID NO: 2036 - DNA, 23 bp, Artificial Sequence
  sgRNA
gggcccctctgaagcggtccagg

SEQ ID NO: 2037 - DNA, 23 bp, Artificial Sequence
  sgRNA
gcggtccaggatcctgcacatgg

SEQ ID NO: 2038 - DNA, 23 bp, Artificial Sequence
  sgRNA
atcctgcacatggcgctgaccgg

SEQ ID NO: 2039 - DNA, 23 bp, Artificial Sequence
  sgRNA
tcctgcacatggcgctgaccggg

SEQ ID NO: 2040 - DNA, 23 bp, Artificial Sequence
  sgRNA
cctgcacatggcgctgaccgggg

SEQ ID NO: 2041 - DNA, 23 bp, Artificial Sequence
  sgRNA
ggcctcagacccctctgcagagg

SEQ ID NO: 2042 - DNA, 23 bp, Artificial Sequence
  sgRNA
agacccctctgcagaggcagagg

SEQ ID NO: 2043 - DNA, 23 bp, Artificial Sequence
  sgRNA
tctgcagaggcagaggccaacgg

SEQ ID NO: 2044 - DNA, 23 bp, Artificial Sequence
  sgRNA
ctgcagaggcagaggccaacggg

SEQ ID NO: 2045 - DNA, 23 bp, Artificial Sequence
  sgRNA
tgcagaggcagaggccaacgggg

SEQ ID NO: 2046 - DNA, 23 bp, Artificial Sequence
  sgRNA
gggagaagccctttctgctgcgg

SEQ ID NO: 2047 - DNA, 23 bp, Artificial Sequence
  sgRNA
ggagaagccctttctgctgcggg

SEQ ID NO: 2048 - DNA, 23 bp, Artificial Sequence
  sgRNA
gcgggcattgcagatcgcgctgg

SEQ ID NO: 2049 - DNA, 23 bp, Artificial Sequence
  sgRNA
ggcattgcagatcgcgctggtgg

SEQ ID NO: 2050 - DNA, 23 bp, Artificial Sequence
  sgRNA
cgctggtggtctccctctactgg

SEQ ID NO: 2051 - DNA, 23 bp, Artificial Sequence
  sgRNA
gctggtggtctccctctactggg

SEQ ID NO: 2052 - DNA, 23 bp, Artificial Sequence
  sgRNA
ctgggtcacctccatctccatgg

SEQ ID NO: 2053 - DNA, 23 bp, Artificial Sequence
  sgRNA
gttccttaataagtacctgctgg

SEQ ID NO: 2054 - DNA, 23 bp, Artificial Sequence
  sgRNA
tgctggacagcccctccctgcgg

SEQ ID NO: 2055 - DNA, 23 bp, Artificial Sequence
  sgRNA
ggacagcccctccctgcggctgg

SEQ ID NO: 2056 - DNA, 23 bp, Artificial Sequence
  sgRNA
cgtcaccttctaccagtgcctgg

SEQ ID NO: 2057 - DNA, 23 bp, Artificial Sequence
  sgRNA
gtgaccacgctgctgtgcaaagg

SEQ ID NO: 2058 - DNA, 23 bp, Artificial Sequence
  sgRNA
gtgcaaaggcctcagcgctctgg

SEQ ID NO: 2059 - DNA, 23 bp, Artificial Sequence
  sgRNA
gctctggccgcctgctgccctgg

SEQ ID NO: 2060 - DNA, 23 bp, Artificial Sequence
  sgRNA
cgcctgctgccctggtgccgtgg

SEQ ID NO: 2061 - DNA, 23 bp, Artificial Sequence
  sgRNA
ggacttccccagcttgcgcctgg

SEQ ID NO: 2062 - DNA, 23 bp, Artificial Sequence
  sgRNA
ccagcttgcgcctggacctcagg

SEQ ID NO: 2063 - DNA, 23 bp, Artificial Sequence
  sgRNA
cagcttgcgcctggacctcaggg

SEQ ID NO: 2064 - DNA, 23 bp, Artificial Sequence
  sgRNA
cttgcgcctggacctcagggtgg

SEQ ID NO: 2065 - DNA, 23 bp, Artificial Sequence
  sgRNA
ccgcagcgtcctgcccctgtcgg

SEQ ID NO: 2066 - DNA, 23 bp, Artificial Sequence
  sgRNA
cagcgtcctgcccctgtcggtgg

SEQ ID NO: 2067 - DNA, 23 bp, Artificial Sequence
  sgRNA
cccctgtcggtggtcttcatcgg

SEQ ID NO: 2068 - DNA, 23 bp, Artificial Sequence
  sgRNA
aacctctgcctcaagtacgtcgg

SEQ ID NO: 2069 - DNA, 23 bp, Artificial Sequence
  sgRNA
ctgcctcaagtacgtcggtgtgg

SEQ ID NO: 2070 - DNA, 23 bp, Artificial Sequence
  sgRNA
cggtgtggccttctacaatgtgg

SEQ ID NO: 2071 - DNA, 23 bp, Artificial Sequence
  sgRNA
ggtgtggccttctacaatgtggg

SEQ ID NO: 2072 - DNA, 23 bp, Artificial Sequence
  sgRNA
ttctatgccctgctcacctgcgg

SEQ ID NO: 2073 - DNA, 23 bp, Artificial Sequence
  sgRNA
cttctggcttggtgtggaccagg

SEQ ID NO: 2074 - DNA, 23 bp, Artificial Sequence
  sgRNA
ctggcttggtgtggaccaggagg

SEQ ID NO: 2075 - DNA, 23 bp, Artificial Sequence
  sgRNA
tggcttggtgtggaccaggaggg

SEQ ID NO: 2076 - DNA, 23 bp, Artificial Sequence
  sgRNA
ggcttggtgtggaccaggagggg

SEQ ID NO: 2077 - DNA, 23 bp, Artificial Sequence
  sgRNA
gcttggtgtggaccaggaggggg

SEQ ID NO: 2078 - DNA, 23 bp, Artificial Sequence
  sgRNA
gtggaccaggagggggcagaagg

SEQ ID NO: 2079 - DNA, 23 bp, Artificial Sequence
  sgRNA
gggcagaaggcaccctgtcgtgg

SEQ ID NO: 2080 - DNA, 23 bp, Artificial Sequence
  sgRNA
agaaggcaccctgtcgtggctgg

SEQ ID NO: 2081 - DNA, 23 bp, Artificial Sequence
  sgRNA
gaaggcaccctgtcgtggctggg

SEQ ID NO: 2082 - DNA, 23 bp, Artificial Sequence
  sgRNA
tcgtggctgggcaccgtcttcgg

SEQ ID NO: 2083 - DNA, 23 bp, Artificial Sequence
  sgRNA
gggcaccgtcttcggcgtgctgg

SEQ ID NO: 2084 - DNA, 23 bp, Artificial Sequence
  sgRNA
caacgccatctacaccacgaagg

SEQ ID NO: 2085 - DNA, 23 bp, Artificial Sequence
  sgRNA
ctacaccacgaaggtgctcccgg

SEQ ID NO: 2086 - DNA, 23 bp, Artificial Sequence
  sgRNA
caccacgaaggtgctcccggcgg

SEQ ID NO: 2087 - DNA, 23 bp, Artificial Sequence
  sgRNA
cacgaaggtgctcccggcggtgg

SEQ ID NO: 2088 - DNA, 23 bp, Artificial Sequence
  sgRNA
aaggtgctcccggcggtggacgg

SEQ ID NO: 2089 - DNA, 23 bp, Artificial Sequence
  sgRNA
cggcggtggacggcagcatctgg

SEQ ID NO: 2090 - DNA, 23 bp, Artificial Sequence
  sgRNA
ctgcccctgctcctgctgctcgg

SEQ ID NO: 2091 - DNA, 23 bp, Artificial Sequence
  sgRNA
tgcccctgctcctgctgctcggg

SEQ ID NO: 2092 - DNA, 23 bp, Artificial Sequence
  sgRNA
gcccctgctcctgctgctcgggg

SEQ ID NO: 2093 - DNA, 23 bp, Artificial Sequence
  sgRNA
cctgctgctcggggagcttcagg

SEQ ID NO: 2094 - DNA, 23 bp, Artificial Sequence
  sgRNA
cctgcgtgactttgcccagctgg

SEQ ID NO: 2095 - DNA, 23 bp, Artificial Sequence
  sgRNA
ctgcgtgactttgcccagctggg

SEQ ID NO: 2096 - DNA, 23 bp, Artificial Sequence
  sgRNA
agctgggcagtgcccacttctgg

SEQ ID NO: 2097 - DNA, 23 bp, Artificial Sequence
  sgRNA
gctgggcagtgcccacttctggg

SEQ ID NO: 2098 - DNA, 23 bp, Artificial Sequence
  sgRNA
ctgggcagtgcccacttctgggg

SEQ ID NO: 2099 - DNA, 23 bp, Artificial Sequence
  sgRNA
tgggcagtgcccacttctggggg

SEQ ID NO: 2100 - DNA, 23 bp, Artificial Sequence
  sgRNA
cttctgggggatgatgacgctgg

SEQ ID NO: 2101 - DNA, 23 bp, Artificial Sequence
  sgRNA
ttctgggggatgatgacgctggg

SEQ ID NO: 2102 - DNA, 23 bp, Artificial Sequence
  sgRNA
tgggggatgatgacgctgggcgg

SEQ ID NO: 2103 - DNA, 23 bp, Artificial Sequence
  sgRNA
atgacgctgggcggcctgtttgg

SEQ ID NO: 2104 - DNA, 23 bp, Artificial Sequence
  sgRNA
ggcctgtttggctttgccatcgg

SEQ ID NO: 2105 - DNA, 23 bp, Artificial Sequence
  sgRNA
tttgccatcggctacgtgacagg

SEQ ID NO: 2106 - DNA, 23 bp, Artificial Sequence
  sgRNA
tccgctgacccacaatgtgtcgg

SEQ ID NO: 2107 - DNA, 23 bp, Artificial Sequence
  sgRNA
ccgctgacccacaatgtgtcggg

SEQ ID NO: 2108 - DNA, 23 bp, Artificial Sequence
  sgRNA
gacccacaatgtgtcgggcacgg

SEQ ID NO: 2109 - DNA, 23 bp, Artificial Sequence
  sgRNA
caatgtgtcgggcacggccaagg

SEQ ID NO: 2110 - DNA, 23 bp, Artificial Sequence
  sgRNA
ggcctgtgcccagacagtgctgg

SEQ ID NO: 2111 - DNA, 23 bp, Artificial Sequence
  sgRNA
gctggccgtgctctactacgagg

SEQ ID NO: 2112 - DNA, 23 bp, Artificial Sequence
  sgRNA
aggagaccaagagcttcctctgg

SEQ ID NO: 2113 - DNA, 23 bp, Artificial Sequence
  sgRNA
agaccaagagcttcctctggtgg

SEQ ID NO: 2114 - DNA, 23 bp, Artificial Sequence
  sgRNA
ctggtggacgagcaacatgatgg

SEQ ID NO: 2115 - DNA, 23 bp, Artificial Sequence
  sgRNA
gacgagcaacatgatggtgctgg

SEQ ID NO: 2116 - DNA, 23 bp, Artificial Sequence
  sgRNA
acgagcaacatgatggtgctggg

SEQ ID NO: 2117 - DNA, 23 bp, Artificial Sequence
  sgRNA
agcaacatgatggtgctgggcgg

SEQ ID NO: 2118 - DNA, 23 bp, Artificial Sequence
  sgRNA
gcggctcctccgcctacacctgg

SEQ ID NO: 2119 - DNA, 23 bp, Artificial Sequence
  sgRNA
cggctcctccgcctacacctggg

SEQ ID NO: 2120 - DNA, 23 bp, Artificial Sequence
  sgRNA
cctccgcctacacctgggtcagg

SEQ ID NO: 2121 - DNA, 23 bp, Artificial Sequence
  sgRNA
ctccgcctacacctgggtcaggg

SEQ ID NO: 2122 - DNA, 23 bp, Artificial Sequence
  sgRNA
tccgcctacacctgggtcagggg

SEQ ID NO: 2123 - DNA, 23 bp, Artificial Sequence
  sgRNA
cctacacctgggtcaggggctgg

SEQ ID NO: 2124 - DNA, 23 bp, Artificial Sequence
  sgRNA
ctacacctgggtcaggggctggg

SEQ ID NO: 2125 - DNA, 23 bp, Artificial Sequence
  sgRNA
ctgggagatgaagaagactccgg

SEQ ID NO: 2126 - DNA, 23 bp, Artificial Sequence
  sgRNA
ggagatgaagaagactccggagg

SEQ ID NO: 2127 - DNA, 23 bp, Artificial Sequence
  sgRNA
agacagcgagaagagcgccatgg

SEQ ID NO: 2128 - DNA, 23 bp, Artificial Sequence
  sgRNA
gacagcgagaagagcgccatggg

SEQ ID NO: 2129 - DNA, 23 bp, Artificial Sequence
  sgRNA
acagcgagaagagcgccatgggg

SEQ ID NO: 2130 - DNA, 23 bp, Artificial Sequence
  sgRNA
cagcgagaagagcgccatggggg

SEQ ID NO: 2131 - DNA, 23 bp, Artificial Sequence
  sgRNA
catgggggtgtgagcaccacagg

SEQ ID NO: 2132 - DNA, 23 bp, Artificial Sequence
  sgRNA
tgtgagcaccacaggcaccctgg

SEQ ID NO: 2133 - DNA, 23 bp, Artificial Sequence
  sgRNA
agcaccacaggcaccctggatgg

SEQ ID NO: 2134 - DNA, 23 bp, Artificial Sequence
  sgRNA
cacaggcaccctggatggcccgg

SEQ ID NO: 2135 - DNA, 23 bp, Artificial Sequence
  sgRNA
caccctggatggcccggccccgg

SEQ ID NO: 2136 - DNA, 23 bp, Artificial Sequence
  sgRNA
accctggatggcccggccccggg

SEQ ID NO: 2137 - DNA, 23 bp, Artificial Sequence
  sgRNA
ccctggatggcccggccccgggg

SEQ ID NO: 2138 - DNA, 23 bp, Artificial Sequence
  sgRNA
cggccccggggcccgtacacagg

SEQ ID NO: 2139 - DNA, 23 bp, Artificial Sequence
  sgRNA
ccccggggcccgtacacaggcgg

SEQ ID NO: 2140 - DNA, 23 bp, Artificial Sequence
  sgRNA
cccggggcccgtacacaggcggg

SEQ ID NO: 2141 - DNA, 23 bp, Artificial Sequence
  sgRNA
ccggggcccgtacacaggcgggg

SEQ ID NO: 2142 - DNA, 23 bp, Artificial Sequence
  sgRNA
cggggccagcacagtagtgaagg

SEQ ID NO: 2143 - DNA, 23 bp, Artificial Sequence
  sgRNA
ggccagcacagtagtgaaggcgg

SEQ ID NO: 2144 - DNA, 23 bp, Artificial Sequence
  sgRNA
cagtagtgaaggcggtctcctgg

SEQ ID NO: 2145 - DNA, 23 bp, Artificial Sequence
  sgRNA
tggaccccagaagcgtgctgtgg

SEQ ID NO: 2146 - DNA, 23 bp, Artificial Sequence
  sgRNA
cccagaagcgtgctgtggtgtgg

SEQ ID NO: 2147 - DNA, 23 bp, Artificial Sequence
  sgRNA
aagcgtgctgtggtgtggactgg

SEQ ID NO: 2148 - DNA, 23 bp, Artificial Sequence
  sgRNA
agcgtgctgtggtgtggactggg

SEQ ID NO: 2149 - DNA, 23 bp, Artificial Sequence
  sgRNA
ttatagacccaatcagaatacgg

SEQ ID NO: 2150 - DNA, 23 bp, Artificial Sequence
  sgRNA
tagacccaatcagaatacggtgg

SEQ ID NO: 2151 - DNA, 23 bp, Artificial Sequence
  sgRNA
tcagaatacggtggttgagaagg

SEQ ID NO: 2152 - DNA, 23 bp, Artificial Sequence
  sgRNA
aagtaatatcagaaagttgaagg

SEQ ID NO: 2153 - DNA, 23 bp, Artificial Sequence
  sgRNA
ctgagtttttgtccttcccgagg

SEQ ID NO: 2154 - DNA, 23 bp, Artificial Sequence
  sgRNA
tgagtttttgtccttcccgaggg

SEQ ID NO: 2155 - DNA, 23 bp, Artificial Sequence
  sgRNA
aaccccttccttctgcctccagg

SEQ ID NO: 2156 - DNA, 23 bp, Artificial Sequence
  sgRNA
accccttccttctgcctccaggg

SEQ ID NO: 2157 - DNA, 23 bp, Artificial Sequence
  sgRNA
tctgcctccacatcactctgagg

SEQ ID NO: 2158 - DNA, 23 bp, Artificial Sequence
  sgRNA
ctccacatcactctgaggacagg

SEQ ID NO: 2159 - DNA, 23 bp, Artificial Sequence
  sgRNA
tccacatcactctgaggacaggg

SEQ ID NO: 2160 - DNA, 23 bp, Artificial Sequence
  sgRNA
atcactctgaggacagggacagg

SEQ ID NO: 2161 - DNA, 23 bp, Artificial Sequence
  sgRNA
gggacaggcaacaaccttgaagg

SEQ ID NO: 2162 - DNA, 23 bp, Artificial Sequence
  sgRNA
ggacaggcaacaaccttgaaggg

SEQ ID NO: 2163 - DNA, 23 bp, Artificial Sequence
  sgRNA
caaccttgaagggacagcaatgg

SEQ ID NO: 2164 - DNA, 23 bp, Artificial Sequence
  sgRNA
cagcaatggcaaagccacaaagg

SEQ ID NO: 2165 - DNA, 23 bp, Artificial Sequence
  sgRNA
acaaaggcttcactgtactcagg

SEQ ID NO: 2166 - DNA, 23 bp, Artificial Sequence
  sgRNA
caaaggcttcactgtactcaggg

SEQ ID NO: 2167 - DNA, 23 bp, Artificial Sequence
  sgRNA
aaaggcttcactgtactcagggg

SEQ ID NO: 2168 - DNA, 23 bp, Artificial Sequence
  sgRNA
ttcactgtactcaggggagatgg

SEQ ID NO: 2169 - DNA, 23 bp, Artificial Sequence
  sgRNA
atggccctaccacagccacctgg

SEQ ID NO: 2170 - DNA, 23 bp, Artificial Sequence
  sgRNA
cctaccacagccacctggagagg

SEQ ID NO: 2171 - DNA, 23 bp, Artificial Sequence
  sgRNA
ctaccacagccacctggagaggg

SEQ ID NO: 2172 - DNA, 23 bp, Artificial Sequence
  sgRNA
cacagccacctggagagggttgg

SEQ ID NO: 2173 - DNA, 23 bp, Artificial Sequence
  sgRNA
acagccacctggagagggttggg

SEQ ID NO: 2174 - DNA, 23 bp, Artificial Sequence
  sgRNA
gttgggaagccttccgtctgcgg

SEQ ID NO: 2175 - DNA, 23 bp, Artificial Sequence
  sgRNA
gggaagccttccgtctgcggtgg

SEQ ID NO: 2176 - DNA, 23 bp, Artificial Sequence
  sgRNA
ggaagccttccgtctgcggtggg

SEQ ID NO: 2177 - DNA, 23 bp, Artificial Sequence
  sgRNA
gccttccgtctgcggtgggcagg

SEQ ID NO: 2178 - DNA, 23 bp, Artificial Sequence
  sgRNA
gtgggcaggcagcctcaccctgg

SEQ ID NO: 2179 - DNA, 23 bp, Artificial Sequence
  sgRNA
tgggcaggcagcctcaccctggg

SEQ ID NO: 2180 - DNA, 23 bp, Artificial Sequence
  sgRNA
ctcaccctgggcccacagaccgg

SEQ ID NO: 2181 - DNA, 23 bp, Artificial Sequence
  sgRNA
cccacagaccggccttcctttgg

SEQ ID NO: 2182 - DNA, 23 bp, Artificial Sequence
  sgRNA
acagaccggccttcctttggagg

SEQ ID NO: 2183 - DNA, 23 bp, Artificial Sequence
  sgRNA
ccttcctttggaggaaagtgtgg

SEQ ID NO: 2184 - DNA, 23 bp, Artificial Sequence
  sgRNA
ctttggaggaaagtgtggcctgg

SEQ ID NO: 2185 - DNA, 23 bp, Artificial Sequence
  sgRNA
ggaaagtgtggcctggactgagg

SEQ ID NO: 2186 - DNA, 23 bp, Artificial Sequence
  sgRNA
gaaagtgtggcctggactgaggg

SEQ ID NO: 2187 - DNA, 23 bp, Artificial Sequence
  sgRNA
agtgtggcctggactgagggagg

SEQ ID NO: 2188 - DNA, 23 bp, Artificial Sequence
  sgRNA
tctgacaccagcagatccccagg

SEQ ID NO: 2189 - DNA, 23 bp, Artificial Sequence
  sgRNA
ctgacaccagcagatccccaggg

SEQ ID NO: 2190 - DNA, 23 bp, Artificial Sequence
  sgRNA
tgacaccagcagatccccagggg

SEQ ID NO: 2191 - DNA, 23 bp, Artificial Sequence
  sgRNA
agcagatccccaggggctgctgg

SEQ ID NO: 2192 - DNA, 23 bp, Artificial Sequence
  sgRNA
gcagatccccaggggctgctggg

SEQ ID NO: 2193 - DNA, 23 bp, Artificial Sequence
  sgRNA
ccccaggggctgctgggcagtgg

SEQ ID NO: 2194 - DNA, 23 bp, Artificial Sequence
  sgRNA
ggggctgctgggcagtggcctgg

SEQ ID NO: 2195 - DNA, 23 bp, Artificial Sequence
  sgRNA
gggctgctgggcagtggcctggg

SEQ ID NO: 2196 - DNA, 23 bp, Artificial Sequence
  sgRNA
gctgggcagtggcctgggaatgg

SEQ ID NO: 2197 - DNA, 23 bp, Artificial Sequence
  sgRNA
ctgggcagtggcctgggaatggg

SEQ ID NO: 2198 - DNA, 23 bp, Artificial Sequence
  sgRNA
tgggcagtggcctgggaatgggg

SEQ ID NO: 2199 - DNA, 23 bp, Artificial Sequence
  sgRNA
gcagtggcctgggaatggggtgg

SEQ ID NO: 2200 - DNA, 23 bp, Artificial Sequence
  sgRNA
atgtccagcttttgaacacaagg

SEQ ID NO: 2201 - DNA, 23 bp, Artificial Sequence
  sgRNA
tgtccagcttttgaacacaaggg

SEQ ID NO: 2202 - DNA, 23 bp, Artificial Sequence
  sgRNA
gggaaccatgcttctcttagagg

SEQ ID NO: 2203 - DNA, 23 bp, Artificial Sequence
  sgRNA
gcttctcttagaggttaagcagg

SEQ ID NO: 2204 - DNA, 23 bp, Artificial Sequence
  sgRNA
cttctcttagaggttaagcaggg

SEQ ID NO: 2205 - DNA, 23 bp, Artificial Sequence
  sgRNA
taacatcacattgtcctgcgtgg

SEQ ID NO: 2206 - DNA, 23 bp, Artificial Sequence
  sgRNA
attgtcctgcgtggctcctctgg

SEQ ID NO: 2207 - DNA, 23 bp, Artificial Sequence
  sgRNA
gtggctcctctggccctgagtgg

SEQ ID NO: 2208 - DNA, 23 bp, Artificial Sequence
  sgRNA
ctgagtggcacctgtccctctgg

SEQ ID NO: 2209 - DNA, 23 bp, Artificial Sequence
  sgRNA
ccctctggtctcccagcacctgg

SEQ ID NO: 2210 - DNA, 23 bp, Artificial Sequence
  sgRNA
ggtctcccagcacctggcccagg

SEQ ID NO: 2211 - DNA, 23 bp, Artificial Sequence
  sgRNA
gccttctgaaagcagagccaagg

SEQ ID NO: 2212 - DNA, 23 bp, Artificial Sequence
  sgRNA
ccccagaagccttcctccccagg

SEQ ID NO: 2213 - DNA, 23 bp, Artificial Sequence
  sgRNA
cagaagccttcctccccaggtgg

SEQ ID NO: 2214 - DNA, 23 bp, Artificial Sequence
  sgRNA
agaagccttcctccccaggtggg

SEQ ID NO: 2215 - DNA, 23 bp, Artificial Sequence
  sgRNA
gaagccttcctccccaggtgggg

SEQ ID NO: 2216 - DNA, 23 bp, Artificial Sequence
  sgRNA
tcctccccaggtggggctgatgg

SEQ ID NO: 2217 - DNA, 23 bp, Artificial Sequence
  sgRNA
caggtggggctgatggagcaagg

SEQ ID NO: 2218 - DNA, 23 bp, Artificial Sequence
  sgRNA
aggtggggctgatggagcaaggg

SEQ ID NO: 2219 - DNA, 23 bp, Artificial Sequence
  sgRNA
atggagcaagggtccagactagg

SEQ ID NO: 2220 - DNA, 23 bp, Artificial Sequence
  sgRNA
ccttccaccccagctgtgtctgg

SEQ ID NO: 2221 - DNA, 23 bp, Artificial Sequence
  sgRNA
ggcgcccctagatctctgcaagg

SEQ ID NO: 2222 - DNA, 23 bp, Artificial Sequence
  sgRNA
gcgcccctagatctctgcaaggg

SEQ ID NO: 2223 - DNA, 23 bp, Artificial Sequence
  sgRNA
cccctagatctctgcaagggagg

SEQ ID NO: 2224 - DNA, 23 bp, Artificial Sequence
  sgRNA
tgcaagggaggtgttacagctgg

SEQ ID NO: 2225 - DNA, 23 bp, Artificial Sequence
  sgRNA
ctgagccgcttgccttgtgatgg

SEQ ID NO: 2226 - DNA, 23 bp, Artificial Sequence
  sgRNA
aacctttacattcttccctgagg

SEQ ID NO: 2227 - DNA, 23 bp, Artificial Sequence
  sgRNA
tacattcttccctgaggttgtgg

SEQ ID NO: 2228 - DNA, 23 bp, Artificial Sequence
  sgRNA
tgtggctgacagagcctgcttgg

SEQ ID NO: 2229 - DNA, 23 bp, Artificial Sequence
  sgRNA
ctcctatatcaaaatgccgtagg

SEQ ID NO: 2230 - DNA, 23 bp, Artificial Sequence
  sgRNA
tatatcaaaatgccgtaggccgg

SEQ ID NO: 2231 - DNA, 23 bp, Artificial Sequence
  sgRNA
atatcaaaatgccgtaggccggg

SEQ ID NO: 2232 - DNA, 23 bp, Artificial Sequence
  sgRNA
tcaaaatgccgtaggccgggtgg

SEQ ID NO: 2233 - DNA, 23 bp, Artificial Sequence
  sgRNA
aaacgtattgctcacagtcctgg

SEQ ID NO: 2234 - DNA, 23 bp, Artificial Sequence
  sgRNA
aacgtattgctcacagtcctggg

SEQ ID NO: 2235 - DNA, 23 bp, Artificial Sequence
  sgRNA
acgtattgctcacagtcctgggg

SEQ ID NO: 2236 - DNA, 23 bp, Artificial Sequence
  sgRNA
cgtattgctcacagtcctggggg

SEQ ID NO: 2237 - DNA, 23 bp, Artificial Sequence
  sgRNA
gtattgctcacagtcctgggggg

SEQ ID NO: 2238 - DNA, 23 bp, Artificial Sequence
  sgRNA
tgctcacagtcctggggggctgg

SEQ ID NO: 2239 - DNA, 23 bp, Artificial Sequence
  sgRNA
gctcacagtcctggggggctggg

SEQ ID NO: 2240 - DNA, 23 bp, Artificial Sequence
  sgRNA
ctgggacgcccaagatcaagagg

SEQ ID NO: 2241 - DNA, 23 bp, Artificial Sequence
  sgRNA
gatcaagaggccagcagattcgg

SEQ ID NO: 2242 - DNA, 23 bp, Artificial Sequence
  sgRNA
agcagattcggactccgctgagg

SEQ ID NO: 2243 - DNA, 23 bp, Artificial Sequence
  sgRNA
gcagattcggactccgctgaggg

SEQ ID NO: 2244 - DNA, 23 bp, Artificial Sequence
  sgRNA
gctgtttcccgatccatagatgg

SEQ ID NO: 2245 - DNA, 23 bp, Artificial Sequence
  sgRNA
ccttctcgctgtatcctcaatgg

SEQ ID NO: 2246 - DNA, 23 bp, Artificial Sequence
  sgRNA
tccttcctgcctcttttataagg

SEQ ID NO: 2247 - DNA, 23 bp, Artificial Sequence
  sgRNA
ggactccaaccctgttcatgagg

SEQ ID NO: 2248 - DNA, 23 bp, Artificial Sequence
  sgRNA
gactccaaccctgttcatgaggg

SEQ ID NO: 2249 - DNA, 23 bp, Artificial Sequence
  sgRNA
catgacccaatcagctccaaagg

SEQ ID NO: 2250 - DNA, 23 bp, Artificial Sequence
  sgRNA
acctcctaatactgtcaccttgg

SEQ ID NO: 2251 - DNA, 23 bp, Artificial Sequence
  sgRNA
cctcctaatactgtcaccttggg

SEQ ID NO: 2252 - DNA, 23 bp, Artificial Sequence
  sgRNA
ctcctaatactgtcaccttgggg

SEQ ID NO: 2253 - DNA, 23 bp, Artificial Sequence
  sgRNA
tcctaatactgtcaccttggggg

SEQ ID NO: 2254 - DNA, 23 bp, Artificial Sequence
  sgRNA
gaattccaatgtgaatttgcagg

SEQ ID NO: 2255 - DNA, 23 bp, Artificial Sequence
  sgRNA
aattccaatgtgaatttgcaggg

SEQ ID NO: 2256 - DNA, 23 bp, Artificial Sequence
  sgRNA
attccaatgtgaatttgcagggg

SEQ ID NO: 2257 - DNA, 23 bp, Artificial Sequence
  sgRNA
ttccaatgtgaatttgcaggggg

SEQ ID NO: 2258 - DNA, 23 bp, Artificial Sequence
  sgRNA
atgtgaatttgcagggggagtgg

SEQ ID NO: 2259 - DNA, 23 bp, Artificial Sequence
  sgRNA
tgtgaatttgcagggggagtggg

SEQ ID NO: 2260 - DNA, 23 bp, Artificial Sequence
  sgRNA
gtgaatttgcagggggagtgggg

SEQ ID NO: 2261 - DNA, 23 bp, Artificial Sequence
  sgRNA
tgaatttgcagggggagtggggg

SEQ ID NO: 2262 - DNA, 23 bp, Artificial Sequence
  sgRNA
tgggggacacacacaaatttcgg

SEQ ID NO: 2263 - DNA, 23 bp, Artificial Sequence
  sgRNA
gggggacacacacaaatttcggg

SEQ ID NO: 2264 - DNA, 23 bp, Artificial Sequence
  sgRNA
ggggacacacacaaatttcgggg

SEQ ID NO: 2265 - DNA, 23 bp, Artificial Sequence
  sgRNA
caccacaccctcctgcgctcagg

SEQ ID NO: 2266 - DNA, 23 bp, Artificial Sequence
  sgRNA
accacaccctcctgcgctcaggg

SEQ ID NO: 2267 - DNA, 23 bp, Artificial Sequence
  sgRNA
acaccctcctgcgctcagggtgg

SEQ ID NO: 2268 - DNA, 23 bp, Artificial Sequence
  sgRNA
tcagggtggcttgcagtccctgg

SEQ ID NO: 2269 - DNA, 23 bp, Artificial Sequence
  sgRNA
cttgcagtccctggcccttctgg

SEQ ID NO: 2270 - DNA, 23 bp, Artificial Sequence
  sgRNA
gcagtccctggcccttctggtgg

SEQ ID NO: 2271 - DNA, 23 bp, Artificial Sequence
  sgRNA
cagtccctggcccttctggtggg

SEQ ID NO: 2272 - DNA, 23 bp, Artificial Sequence
  sgRNA
tggcccttctggtgggcatttgg

SEQ ID NO: 2273 - DNA, 23 bp, Artificial Sequence
  sgRNA
atttggtatgtcctttctcttgg

SEQ ID NO: 2274 - DNA, 23 bp, Artificial Sequence
  sgRNA
tttggtatgtcctttctcttggg

SEQ ID NO: 2275 - DNA, 23 bp, Artificial Sequence
  sgRNA
ttggtatgtcctttctcttgggg

SEQ ID NO: 2276 - DNA, 23 bp, Artificial Sequence
  sgRNA
actctatatagtgaaaagctagg

SEQ ID NO: 2277 - DNA, 23 bp, Artificial Sequence
  sgRNA
ctctatatagtgaaaagctaggg

SEQ ID NO: 2278 - DNA, 23 bp, Artificial Sequence
  sgRNA
tagtgaaaagctagggagagcgg

SEQ ID NO: 2279 - DNA, 23 bp, Artificial Sequence
  sgRNA
agtgaaaagctagggagagcggg

SEQ ID NO: 2280 - DNA, 23 bp, Artificial Sequence
  sgRNA
agtcccctcacaatcccagatgg

SEQ ID NO: 2281 - DNA, 23 bp, Artificial Sequence
  sgRNA
gtcccctcacaatcccagatggg

SEQ ID NO: 2282 - DNA, 23 bp, Artificial Sequence
  sgRNA
atgggttctaatgcagctgctgg

SEQ ID NO: 2283 - DNA, 23 bp, Artificial Sequence
  sgRNA
tgggttctaatgcagctgctggg

SEQ ID NO: 2284 - DNA, 23 bp, Artificial Sequence
  sgRNA
gggttctaatgcagctgctgggg

SEQ ID NO: 2285 - DNA, 23 bp, Artificial Sequence
  sgRNA
cttctggcttggtgtggaccagg

SEQ ID NO: 2286 - DNA, 23 bp, Artificial Sequence
  sgRNA
ctggcttggtgtggaccaggagg

SEQ ID NO: 2287 - DNA, 23 bp, Artificial Sequence
  sgRNA
tggcttggtgtggaccaggaggg

SEQ ID NO: 2288 - DNA, 23 bp, Artificial Sequence
  sgRNA
ggcttggtgtggaccaggagggg

SEQ ID NO: 2289 - DNA, 23 bp, Artificial Sequence
  sgRNA
gcttggtgtggaccaggaggggg

SEQ ID NO: 2290 - DNA, 23 bp, Artificial Sequence
  sgRNA
gtggaccaggagggggcagaagg

SEQ ID NO: 2291 - DNA, 23 bp, Artificial Sequence
  sgRNA
gggcagaaggcaccctgtcgtgg

SEQ ID NO: 2292 - DNA, 23 bp, Artificial Sequence
  sgRNA
agaaggcaccctgtcgtggctgg

SEQ ID NO: 2293 - DNA, 23 bp, Artificial Sequence
  sgRNA
gaaggcaccctgtcgtggctggg

SEQ ID NO: 2294 - DNA, 23 bp, Artificial Sequence
  sgRNA
tcgtggctgggcaccgtcttcgg

SEQ ID NO: 2295 - DNA, 23 bp, Artificial Sequence
  sgRNA
gggcaccgtcttcggcgtgctgg

SEQ ID NO: 2296 - DNA, 23 bp, Artificial Sequence
  sgRNA
caacgccatctacaccacgaagg

SEQ ID NO: 2297 - DNA, 23 bp, Artificial Sequence
  sgRNA
ctacaccacgaaggtgctcccgg

SEQ ID NO: 2298 - DNA, 23 bp, Artificial Sequence
  sgRNA
caccacgaaggtgctcccggcgg

SEQ ID NO: 2299 - DNA, 23 bp, Artificial Sequence
  sgRNA
cacgaaggtgctcccggcggtgg

SEQ ID NO: 2300 - DNA, 23 bp, Artificial Sequence
  sgRNA
aaggtgctcccggcggtggacgg

SEQ ID NO: 2301 - DNA, 23 bp, Artificial Sequence
  sgRNA
cggcggtggacggcagcatctgg

SEQ ID NO: 2302 - DNA, 23 bp, Artificial Sequence
  sgRNA
ctgcccctgctcctgctgctcgg

SEQ ID NO: 2303 - DNA, 23 bp, Artificial Sequence
  sgRNA
tgcccctgctcctgctgctcggg

SEQ ID NO: 2304 - DNA, 23 bp, Artificial Sequence
  sgRNA
gcccctgctcctgctgctcgggg

SEQ ID NO: 2305 - DNA, 23 bp, Artificial Sequence
  sgRNA
cctgctgctcggggagcttcagg

SEQ ID NO: 2306 - DNA, 23 bp, Artificial Sequence
  sgRNA
cctgcgtgactttgcccagctgg

SEQ ID NO: 2307 - DNA, 23 bp, Artificial Sequence
  sgRNA
ctgcgtgactttgcccagctggg

SEQ ID NO: 2308 - DNA, 23 bp, Artificial Sequence
  sgRNA
agctgggcagtgcccacttctgg

SEQ ID NO: 2309 - DNA, 23 bp, Artificial Sequence
  sgRNA
gctgggcagtgcccacttctggg

SEQ ID NO: 2310 - DNA, 23 bp, Artificial Sequence
  sgRNA
ctgggcagtgcccacttctgggg

SEQ ID NO: 2311 - DNA, 23 bp, Artificial Sequence
  sgRNA
tgggcagtgcccacttctggggg

SEQ ID NO: 2312 - DNA, 23 bp, Artificial Sequence
  sgRNA
cttctgggggatgatgacgctgg

SEQ ID NO: 2313 - DNA, 23 bp, Artificial Sequence
  sgRNA
ttctgggggatgatgacgctggg

SEQ ID NO: 2314 - DNA, 23 bp, Artificial Sequence
  sgRNA
tgggggatgatgacgctgggcgg

SEQ ID NO: 2315 - DNA, 23 bp, Artificial Sequence
  sgRNA
atgacgctgggcggcctgtttgg

SEQ ID NO: 2316 - DNA, 23 bp, Artificial Sequence
  sgRNA
ggcctgtttggctttgccatcgg

SEQ ID NO: 2317 - DNA, 23 bp, Artificial Sequence
  sgRNA
tttgccatcggctacgtgacagg

SEQ ID NO: 2318 - DNA, 23 bp, Artificial Sequence
  sgRNA
tccgctgacccacaatgtgtcgg

SEQ ID NO: 2319 - DNA, 23 bp, Artificial Sequence
  sgRNA
ccgctgacccacaatgtgtcggg

SEQ ID NO: 2320 - DNA, 23 bp, Artificial Sequence
  sgRNA
gacccacaatgtgtcgggcacgg

SEQ ID NO: 2321 - DNA, 23 bp, Artificial Sequence
  sgRNA
caatgtgtcgggcacggccaagg

SEQ ID NO: 2322 - DNA, 23 bp, Artificial Sequence
  sgRNA
ggcctgtgcccagacagtgctgg

SEQ ID NO: 2323 - DNA, 23 bp, Artificial Sequence
  sgRNA
gctggccgtgctctactacgagg

SEQ ID NO: 2324 - DNA, 23 bp, Artificial Sequence
  sgRNA
aggagaccaagagcttcctctgg

SEQ ID NO: 2325 - DNA, 23 bp, Artificial Sequence
  sgRNA
agaccaagagcttcctctggtgg

SEQ ID NO: 2326 - DNA, 23 bp, Artificial Sequence
  sgRNA
ctggtggacgagcaacatgatgg

SEQ ID NO: 2327 - DNA, 23 bp, Artificial Sequence
  sgRNA
gacgagcaacatgatggtgctgg

SEQ ID NO: 2328 - DNA, 23 bp, Artificial Sequence
  sgRNA
acgagcaacatgatggtgctggg

SEQ ID NO: 2329 - DNA, 23 bp, Artificial Sequence
  sgRNA
agcaacatgatggtgctgggcgg

SEQ ID NO: 2330 - DNA, 23 bp, Artificial Sequence
  sgRNA
gcggctcctccgcctacacctgg

SEQ ID NO: 2331 - DNA, 23 bp, Artificial Sequence
  sgRNA
cggctcctccgcctacacctggg

SEQ ID NO: 2332 - DNA, 23 bp, Artificial Sequence
  sgRNA
cctccgcctacacctgggtcagg

SEQ ID NO: 2333 - DNA, 23 bp, Artificial Sequence
  sgRNA
ctccgcctacacctgggtcaggg

SEQ ID NO: 2334 - DNA, 23 bp, Artificial Sequence
  sgRNA
tccgcctacacctgggtcagggg

SEQ ID NO: 2335 - DNA, 23 bp, Artificial Sequence
  sgRNA
cctacacctgggtcaggggctgg

SEQ ID NO: 2336 - DNA, 23 bp, Artificial Sequence
  sgRNA
ctacacctgggtcaggggctggg

SEQ ID NO: 2337 - DNA, 23 bp, Artificial Sequence
  sgRNA
ctgggagatgaagaagactccgg

SEQ ID NO: 2338 - DNA, 23 bp, Artificial Sequence
  sgRNA
ggagatgaagaagactccggagg

SEQ ID NO: 2339 - DNA, 23 bp, Artificial Sequence
  sgRNA
agacagcgagaagagcgccatgg

SEQ ID NO: 2340 - DNA, 23 bp, Artificial Sequence
  sgRNA
gacagcgagaagagcgccatggg

SEQ ID NO: 2341 - DNA, 23 bp, Artificial Sequence
  sgRNA
acagcgagaagagcgccatgggg

SEQ ID NO: 2342 - DNA, 23 bp, Artificial Sequence
  sgRNA
cagcgagaagagcgccatggggg

SEQ ID NO: 2343 - DNA, 23 bp, Artificial Sequence
  sgRNA
catgggggtgtgagcaccacagg

SEQ ID NO: 2344 - DNA, 23 bp, Artificial Sequence
  sgRNA
tgtgagcaccacaggcaccctgg

SEQ ID NO: 2345 - DNA, 23 bp, Artificial Sequence
  sgRNA
agcaccacaggcaccctggatgg

SEQ ID NO: 2346 - DNA, 23 bp, Artificial Sequence
  sgRNA
cacaggcaccctggatggcccgg

SEQ ID NO: 2347 - DNA, 23 bp, Artificial Sequence
  sgRNA
caccctggatggcccggccccgg

SEQ ID NO: 2348 - DNA, 23 bp, Artificial Sequence
  sgRNA
accctggatggcccggccccggg

SEQ ID NO: 2349 - DNA, 23 bp, Artificial Sequence
  sgRNA
ccctggatggcccggccccgggg

SEQ ID NO: 2350 - DNA, 23 bp, Artificial Sequence
  sgRNA
cggccccggggcccgtacacagg

SEQ ID NO: 2351 - DNA, 23 bp, Artificial Sequence
  sgRNA
ccccggggcccgtacacaggcgg

SEQ ID NO: 2352 - DNA, 23 bp, Artificial Sequence
  sgRNA
cccggggcccgtacacaggcggg

SEQ ID NO: 2353 - DNA, 23 bp, Artificial Sequence
  sgRNA
ccggggcccgtacacaggcgggg

SEQ ID NO: 2354 - DNA, 23 bp, Artificial Sequence
  sgRNA
cggggccagcacagtagtgaagg

SEQ ID NO: 2355 - DNA, 23 bp, Artificial Sequence
  sgRNA
ggccagcacagtagtgaaggcgg

SEQ ID NO: 2356 - DNA, 23 bp, Artificial Sequence
  sgRNA
cagtagtgaaggcggtctcctgg

SEQ ID NO: 2357 - DNA, 23 bp, Artificial Sequence
  sgRNA
tggaccccagaagcgtgctgtgg

SEQ ID NO: 2358 - DNA, 23 bp, Artificial Sequence
  sgRNA
cccagaagcgtgctgtggtgtgg

SEQ ID NO: 2359 - DNA, 23 bp, Artificial Sequence
  sgRNA
aagcgtgctgtggtgtggactgg

SEQ ID NO: 2360 - DNA, 23 bp, Artificial Sequence
  sgRNA
agcgtgctgtggtgtggactggg

SEQ ID NO: 2361 - DNA, 23 bp, Artificial Sequence
  sgRNA
ttatagacccaatcagaatacgg

SEQ ID NO: 2362 - DNA, 23 bp, Artificial Sequence
  sgRNA
tagacccaatcagaatacggtgg

SEQ ID NO: 2363 - DNA, 23 bp, Artificial Sequence
  sgRNA
tcagaatacggtggttgagaagg

SEQ ID NO: 2364 - DNA, 23 bp, Artificial Sequence
  sgRNA
aagtaatatcagaaagttgaagg

SEQ ID NO: 2365 - DNA, 23 bp, Artificial Sequence
  sgRNA
tccagaaaatactgtttccccgg

SEQ ID NO: 2366 - DNA, 23 bp, Artificial Sequence
  sgRNA
gaaaatactgtttccccggccgg

SEQ ID NO: 2367 - DNA, 23 bp, Artificial Sequence
  sgRNA
cgcgtccctgcctgtgtccccgg

SEQ ID NO: 2368 - DNA, 23 bp, Artificial Sequence
  sgRNA
gcgtccctgcctgtgtccccggg

SEQ ID NO: 2369 - DNA, 23 bp, Artificial Sequence
  sgRNA
cctgtgtccccgggccgcgaagg

SEQ ID NO: 2370 - DNA, 23 bp, Artificial Sequence
  sgRNA
cccgggccgcgaaggcgacctgg

SEQ ID NO: 2371 - DNA, 23 bp, Artificial Sequence
  sgRNA
gacctggcgctcacctcctccgg

SEQ ID NO: 2372 - DNA, 23 bp, Artificial Sequence
  sgRNA
gctcacctcctccggtgcactgg

SEQ ID NO: 2373 - DNA, 23 bp, Artificial Sequence
  sgRNA
ctcacctcctccggtgcactggg

SEQ ID NO: 2374 - DNA, 23 bp, Artificial Sequence
  sgRNA
gcatctgcagcgccgcaccctgg

SEQ ID NO: 2375 - DNA, 23 bp, Artificial Sequence
  sgRNA
catctgcagcgccgcaccctggg

SEQ ID NO: 2376 - DNA, 23 bp, Artificial Sequence
  sgRNA
cgcaccctgggccgcgcccgcgg

SEQ ID NO: 2377 - DNA, 23 bp, Artificial Sequence
  sgRNA
gcaccctgggccgcgcccgcggg

SEQ ID NO: 2378 - DNA, 23 bp, Artificial Sequence
  sgRNA
cgacttcctgctttccgccccgg

SEQ ID NO: 2379 - DNA, 23 bp, Artificial Sequence
  sgRNA
gacttcctgctttccgccccggg

SEQ ID NO: 2380 - DNA, 23 bp, Artificial Sequence
  sgRNA
cctgctttccgccccgggcccgg

SEQ ID NO: 2381 - DNA, 23 bp, Artificial Sequence
  sgRNA
ctgctttccgccccgggcccggg

SEQ ID NO: 2382 - DNA, 23 bp, Artificial Sequence
  sgRNA
gggcaccttgccagcctcgccgg

SEQ ID NO: 2383 - DNA, 23 bp, Artificial Sequence
  sgRNA
cagcctcgccggcctgttcgcgg

SEQ ID NO: 2384 - DNA, 23 bp, Artificial Sequence
  sgRNA
tcgccggcctgttcgcggcatgg

SEQ ID NO: 2385 - DNA, 23 bp, Artificial Sequence
  sgRNA
cgccggcctgttcgcggcatggg

SEQ ID NO: 2386 - DNA, 23 bp, Artificial Sequence
  sgRNA
cctgttcgcggcatgggccccgg

SEQ ID NO: 2387 - DNA, 23 bp, Artificial Sequence
  sgRNA
ctgttcgcggcatgggccccggg

SEQ ID NO: 2388 - DNA, 23 bp, Artificial Sequence
  sgRNA
tgttcgcggcatgggccccgggg

SEQ ID NO: 2389 - DNA, 23 bp, Artificial Sequence
  sgRNA
gttcgcggcatgggccccggggg

SEQ ID NO: 2390 - DNA, 23 bp, Artificial Sequence
  sgRNA
ggcatgggccccgggggtgccgg

SEQ ID NO: 2391 - DNA, 23 bp, Artificial Sequence
  sgRNA
atgggccccgggggtgccggcgg

SEQ ID NO: 2392 - DNA, 23 bp, Artificial Sequence
  sgRNA
ccccgggggtgccggcggagagg

SEQ ID NO: 2393 - DNA, 23 bp, Artificial Sequence
  sgRNA
cgggggtgccggcggagaggcgg

SEQ ID NO: 2394 - DNA, 23 bp, Artificial Sequence
  sgRNA
ccggcggagaggcggtgatccgg

SEQ ID NO: 2395 - DNA, 23 bp, Artificial Sequence
  sgRNA
cggagaggcggtgatccggacgg

SEQ ID NO: 2396 - DNA, 23 bp, Artificial Sequence
  sgRNA
ggcggtgatccggacggtcgtgg

SEQ ID NO: 2397 - DNA, 23 bp, Artificial Sequence
  sgRNA
gcggtgatccggacggtcgtggg

SEQ ID NO: 2398 - DNA, 23 bp, Artificial Sequence
  sgRNA
gtgatccggacggtcgtgggagg

SEQ ID NO: 2399 - DNA, 23 bp, Artificial Sequence
  sgRNA
atccggacggtcgtgggaggagg

SEQ ID NO: 2400 - DNA, 23 bp, Artificial Sequence
  sgRNA
gaggccctctcctctttccaagg

SEQ ID NO: 2401 - DNA, 23 bp, Artificial Sequence
  sgRNA
tccaaggctactcctgtccctgg

SEQ ID NO: 2402 - DNA, 23 bp, Artificial Sequence
  sgRNA
ccctggtacccccgcccgcccgg

SEQ ID NO: 2403 - DNA, 23 bp, Artificial Sequence
  sgRNA
cctggtacccccgcccgcccggg

SEQ ID NO: 2404 - DNA, 23 bp, Artificial Sequence
  sgRNA
acccccgcccgcccgggacccgg

SEQ ID NO: 2405 - DNA, 23 bp, Artificial Sequence
  sgRNA
ccggcttcagttaccgcagctgg

SEQ ID NO: 2406 - DNA, 23 bp, Artificial Sequence
  sgRNA
ttaccgcagctggcacgtcccgg

SEQ ID NO: 2407 - DNA, 23 bp, Artificial Sequence
  sgRNA
taccgcagctggcacgtcccggg

SEQ ID NO: 2408 - DNA, 23 bp, Artificial Sequence
  sgRNA
agctggcacgtcccgggacttgg

SEQ ID NO: 2409 - DNA, 23 bp, Artificial Sequence
  sgRNA
ccgggacttggctgtatccctgg

SEQ ID NO: 2410 - DNA, 23 bp, Artificial Sequence
  sgRNA
tccctggcccgccgcgctaccgg

SEQ ID NO: 2411 - DNA, 23 bp, Artificial Sequence
  sgRNA
tgcacttccagaagtgcgtgcgg

SEQ ID NO: 2412 - DNA, 23 bp, Artificial Sequence
  sgRNA
gcacttccagaagtgcgtgcggg

SEQ ID NO: 2413 - DNA, 23 bp, Artificial Sequence
  sgRNA
cacttccagaagtgcgtgcgggg

SEQ ID NO: 2414 - DNA, 23 bp, Artificial Sequence
  sgRNA
tgatgataccgcaggtgagcagg

SEQ ID NO: 2415 - DNA, 23 bp, Artificial Sequence
  sgRNA
gatgataccgcaggtgagcaggg

SEQ ID NO: 2416 - DNA, 23 bp, Artificial Sequence
  sgRNA
gcaggtgagcagggcatagaagg

SEQ ID NO: 2417 - DNA, 23 bp, Artificial Sequence
  sgRNA
ggtgagcagggcatagaaggagg

SEQ ID NO: 2418 - DNA, 23 bp, Artificial Sequence
  sgRNA
gagcagggcatagaaggaggtgg

SEQ ID NO: 2419 - DNA, 23 bp, Artificial Sequence
  sgRNA
aggtggtctgcttgagcagcagg

SEQ ID NO: 2420 - DNA, 23 bp, Artificial Sequence
  sgRNA
ggtctgcttgagcagcaggtagg

SEQ ID NO: 2421 - DNA, 23 bp, Artificial Sequence
  sgRNA
ggagagcagcacgttgaagacgg

SEQ ID NO: 2422 - DNA, 23 bp, Artificial Sequence
  sgRNA
gagcagcacgttgaagacggtgg

SEQ ID NO: 2423 - DNA, 23 bp, Artificial Sequence
  sgRNA
tgaagacggtggtgagtgagcgg

SEQ ID NO: 2424 - DNA, 23 bp, Artificial Sequence
  sgRNA
tgagcggcccacattgtagaagg

SEQ ID NO: 2425 - DNA, 23 bp, Artificial Sequence
  sgRNA
aggccacaccgacgtacttgagg

SEQ ID NO: 2426 - DNA, 23 bp, Artificial Sequence
  sgRNA
caccgacgtacttgaggcagagg

SEQ ID NO: 2427 - DNA, 23 bp, Artificial Sequence
  sgRNA
cttgaggcagaggttattgaagg

SEQ ID NO: 2428 - DNA, 23 bp, Artificial Sequence
  sgRNA
tgccgatgaagaccaccgacagg

SEQ ID NO: 2429 - DNA, 23 bp, Artificial Sequence
  sgRNA
gccgatgaagaccaccgacaggg

SEQ ID NO: 2430 - DNA, 23 bp, Artificial Sequence
  sgRNA
ccgatgaagaccaccgacagggg

SEQ ID NO: 2431 - DNA, 23 bp, Artificial Sequence
  sgRNA
tgaagaccaccgacaggggcagg

SEQ ID NO: 2432 - DNA, 23 bp, Artificial Sequence
  sgRNA
ccgacaggggcaggacgctgcgg

SEQ ID NO: 2433 - DNA, 23 bp, Artificial Sequence
  sgRNA
cgacaggggcaggacgctgcggg

SEQ ID NO: 2434 - DNA, 23 bp, Artificial Sequence
  sgRNA
ggacgctgcgggccaccctgagg

SEQ ID NO: 2435 - DNA, 23 bp, Artificial Sequence
  sgRNA
tgcgggccaccctgaggtccagg

SEQ ID NO: 2436 - DNA, 23 bp, Artificial Sequence
  sgRNA
cctgaggtccaggcgcaagctgg

SEQ ID NO: 2437 - DNA, 23 bp, Artificial Sequence
  sgRNA
ctgaggtccaggcgcaagctggg

SEQ ID NO: 2438 - DNA, 23 bp, Artificial Sequence
  sgRNA
tgaggtccaggcgcaagctgggg

SEQ ID NO: 2439 - DNA, 23 bp, Artificial Sequence
  sgRNA
gcgcaagctggggaagtccacgg

SEQ ID NO: 2440 - DNA, 23 bp, Artificial Sequence
  sgRNA
ctggggaagtccacggcaccagg

SEQ ID NO: 2441 - DNA, 23 bp, Artificial Sequence
  sgRNA
tggggaagtccacggcaccaggg

SEQ ID NO: 2442 - DNA, 23 bp, Artificial Sequence
  sgRNA
gtccacggcaccagggcagcagg

SEQ ID NO: 2443 - DNA, 23 bp, Artificial Sequence
  sgRNA
cacggcaccagggcagcaggcgg

SEQ ID NO: 2444 - DNA, 23 bp, Artificial Sequence
  sgRNA
agcaggcggccagagcgctgagg

SEQ ID NO: 2445 - DNA, 23 bp, Artificial Sequence
  sgRNA
gaggcctttgcacagcagcgtgg

SEQ ID NO: 2446 - DNA, 23 bp, Artificial Sequence
  sgRNA
tgcacagcagcgtggtcaccagg

SEQ ID NO: 2447 - DNA, 23 bp, Artificial Sequence
  sgRNA
gcagcgtggtcaccaggcactgg

SEQ ID NO: 2448 - DNA, 23 bp, Artificial Sequence
  sgRNA
ggtcaccaggcactggtagaagg

SEQ ID NO: 2449 - DNA, 23 bp, Artificial Sequence
  sgRNA
ctggtagaaggtgacgaagatgg

SEQ ID NO: 2450 - DNA, 23 bp, Artificial Sequence
  sgRNA
tggtagaaggtgacgaagatggg

SEQ ID NO: 2451 - DNA, 23 bp, Artificial Sequence
  sgRNA
ggtagaaggtgacgaagatgggg

SEQ ID NO: 2452 - DNA, 23 bp, Artificial Sequence
  sgRNA
gtagaaggtgacgaagatggggg

SEQ ID NO: 2453 - DNA, 23 bp, Artificial Sequence
  sgRNA
agatgggggtgtccagccgcagg

SEQ ID NO: 2454 - DNA, 23 bp, Artificial Sequence
  sgRNA
gatgggggtgtccagccgcaggg

SEQ ID NO: 2455 - DNA, 23 bp, Artificial Sequence
  sgRNA
gggggtgtccagccgcagggagg

SEQ ID NO: 2456 - DNA, 23 bp, Artificial Sequence
  sgRNA
ggggtgtccagccgcagggaggg

SEQ ID NO: 2457 - DNA, 23 bp, Artificial Sequence
  sgRNA
gggtgtccagccgcagggagggg

SEQ ID NO: 2458 - DNA, 23 bp, Artificial Sequence
  sgRNA
gcagggaggggctgtccagcagg

SEQ ID NO: 2459 - DNA, 23 bp, Artificial Sequence
  sgRNA
tgtccagcaggtacttattaagg

SEQ ID NO: 2460 - DNA, 23 bp, Artificial Sequence
  sgRNA
gtacttattaaggaacaccatgg

SEQ ID NO: 2461 - DNA, 23 bp, Artificial Sequence
  sgRNA
attaaggaacaccatggagatgg

SEQ ID NO: 2462 - DNA, 23 bp, Artificial Sequence
  sgRNA
aaggaacaccatggagatggagg

SEQ ID NO: 2463 - DNA, 23 bp, Artificial Sequence
  sgRNA
agatggaggtgacccagtagagg

SEQ ID NO: 2464 - DNA, 23 bp, Artificial Sequence
  sgRNA
gatggaggtgacccagtagaggg

SEQ ID NO: 2465 - DNA, 23 bp, Artificial Sequence
  sgRNA
ctgcaatgcccgcagcagaaagg

SEQ ID NO: 2466 - DNA, 23 bp, Artificial Sequence
  sgRNA
tgcaatgcccgcagcagaaaggg

SEQ ID NO: 2467 - DNA, 23 bp, Artificial Sequence
  sgRNA
cagaaagggcttctccccgttgg

SEQ ID NO: 2468 - DNA, 23 bp, Artificial Sequence
  sgRNA
gttggcctctgcctctgcagagg

SEQ ID NO: 2469 - DNA, 23 bp, Artificial Sequence
  sgRNA
ttggcctctgcctctgcagaggg

SEQ ID NO: 2470 - DNA, 23 bp, Artificial Sequence
  sgRNA
tggcctctgcctctgcagagggg

SEQ ID NO: 2471 - DNA, 23 bp, Artificial Sequence
  sgRNA
tgcctctgcagaggggtctgagg

SEQ ID NO: 2472 - DNA, 23 bp, Artificial Sequence
  sgRNA
tgcagaggggtctgaggccccgg

SEQ ID NO: 2473 - DNA, 23 bp, Artificial Sequence
  sgRNA
ccccggtcagcgccatgtgcagg

SEQ ID NO: 2474 - DNA, 23 bp, Artificial Sequence
  sgRNA
cagcgccatgtgcaggatcctgg

SEQ ID NO: 2475 - DNA, 23 bp, Artificial Sequence
  sgRNA
aggatcctggaccgcttcagagg

SEQ ID NO: 2476 - DNA, 23 bp, Artificial Sequence
  sgRNA
ggatcctggaccgcttcagaggg

SEQ ID NO: 2477 - DNA, 23 bp, Artificial Sequence
  sgRNA
gatcctggaccgcttcagagggg

SEQ ID NO: 2478 - DNA, 23 bp, Artificial Sequence
  sgRNA
tgatgataccgcaggtgagcagg

SEQ ID NO: 2479 - DNA, 23 bp, Artificial Sequence
  sgRNA
gatgataccgcaggtgagcaggg

SEQ ID NO: 2480 - DNA, 23 bp, Artificial Sequence
  sgRNA
gcaggtgagcagggcatagaagg

SEQ ID NO: 2481 - DNA, 23 bp, Artificial Sequence
  sgRNA
ggtgagcagggcatagaaggagg

SEQ ID NO: 2482 - DNA, 23 bp, Artificial Sequence
  sgRNA
gagcagggcatagaaggaggtgg

SEQ ID NO: 2483 - DNA, 23 bp, Artificial Sequence
  sgRNA
aggtggtctgcttgagcagcagg

SEQ ID NO: 2484 - DNA, 23 bp, Artificial Sequence
  sgRNA
ggtctgcttgagcagcaggtagg

SEQ ID NO: 2485 - DNA, 23 bp, Artificial Sequence
  sgRNA
ggagagcagcacgttgaagacgg

SEQ ID NO: 2486 - DNA, 23 bp, Artificial Sequence
  sgRNA
gagcagcacgttgaagacggtgg

SEQ ID NO: 2487 - DNA, 23 bp, Artificial Sequence
  sgRNA
tgaagacggtggtgagtgagcgg

SEQ ID NO: 2488 - DNA, 23 bp, Artificial Sequence
  sgRNA
tgagcggcccacattgtagaagg

SEQ ID NO: 2489 - DNA, 23 bp, Artificial Sequence
  sgRNA
aggccacaccgacgtacttgagg

SEQ ID NO: 2490 - DNA, 23 bp, Artificial Sequence
  sgRNA
caccgacgtacttgaggcagagg

SEQ ID NO: 2491 - DNA, 23 bp, Artificial Sequence
  sgRNA
cttgaggcagaggttattgaagg

SEQ ID NO: 2492 - DNA, 23 bp, Artificial Sequence
  sgRNA
tgccgatgaagaccaccgacagg

SEQ ID NO: 2493 - DNA, 23 bp, Artificial Sequence
  sgRNA
gccgatgaagaccaccgacaggg

SEQ ID NO: 2494 - DNA, 23 bp, Artificial Sequence
  sgRNA
ccgatgaagaccaccgacagggg

SEQ ID NO: 2495 - DNA, 23 bp, Artificial Sequence
  sgRNA
tgaagaccaccgacaggggcagg

SEQ ID NO: 2496 - DNA, 23 bp, Artificial Sequence
  sgRNA
ccgacaggggcaggacgctgcgg

SEQ ID NO: 2497 - DNA, 23 bp, Artificial Sequence
  sgRNA
cgacaggggcaggacgctgcggg

SEQ ID NO: 2498 - DNA, 23 bp, Artificial Sequence
  sgRNA
ggacgctgcgggccaccctgagg

SEQ ID NO: 2499 - DNA, 23 bp, Artificial Sequence
  sgRNA
tgcgggccaccctgaggtccagg

SEQ ID NO: 2500 - DNA, 23 bp, Artificial Sequence
  sgRNA
cctgaggtccaggcgcaagctgg

SEQ ID NO: 2501 - DNA, 23 bp, Artificial Sequence
  sgRNA
ctgaggtccaggcgcaagctggg

SEQ ID NO: 2502 - DNA, 23 bp, Artificial Sequence
  sgRNA
tgaggtccaggcgcaagctgggg

SEQ ID NO: 2503 - DNA, 23 bp, Artificial Sequence
  sgRNA
gcgcaagctggggaagtccacgg

SEQ ID NO: 2504 - DNA, 23 bp, Artificial Sequence
  sgRNA
ctggggaagtccacggcaccagg

SEQ ID NO: 2505 - DNA, 23 bp, Artificial Sequence
  sgRNA
tggggaagtccacggcaccaggg

SEQ ID NO: 2506 - DNA, 23 bp, Artificial Sequence
  sgRNA
gtccacggcaccagggcagcagg

SEQ ID NO: 2507 - DNA, 23 bp, Artificial Sequence
  sgRNA
cacggcaccagggcagcaggcgg

SEQ ID NO: 2508 - DNA, 23 bp, Artificial Sequence
  sgRNA
agcaggcggccagagcgctgagg

SEQ ID NO: 2509 - DNA, 23 bp, Artificial Sequence
  sgRNA
gaggcctttgcacagcagcgtgg

SEQ ID NO: 2510 - DNA, 23 bp, Artificial Sequence
  sgRNA
tgcacagcagcgtggtcaccagg

SEQ ID NO: 2511 - DNA, 23 bp, Artificial Sequence
  sgRNA
gcagcgtggtcaccaggcactgg

SEQ ID NO: 2512 - DNA, 23 bp, Artificial Sequence
  sgRNA
ggtcaccaggcactggtagaagg

SEQ ID NO: 2513 - DNA, 23 bp, Artificial Sequence
  sgRNA
ctggtagaaggtgacgaagatgg

SEQ ID NO: 2514 - DNA, 23 bp, Artificial Sequence
  sgRNA
tggtagaaggtgacgaagatggg

SEQ ID NO: 2515 - DNA, 23 bp, Artificial Sequence
  sgRNA
ggtagaaggtgacgaagatgggg

SEQ ID NO: 2516 - DNA, 23 bp, Artificial Sequence
  sgRNA
gtagaaggtgacgaagatggggg

SEQ ID NO: 2517 - DNA, 23 bp, Artificial Sequence
  sgRNA
agatgggggtgtccagccgcagg

SEQ ID NO: 2518 - DNA, 23 bp, Artificial Sequence
  sgRNA
gatgggggtgtccagccgcaggg

SEQ ID NO: 2519 - DNA, 23 bp, Artificial Sequence
  sgRNA
gggggtgtccagccgcagggagg

SEQ ID NO: 2520 - DNA, 23 bp, Artificial Sequence
  sgRNA
ggggtgtccagccgcagggaggg

SEQ ID NO: 2521 - DNA, 23 bp, Artificial Sequence
  sgRNA
gggtgtccagccgcagggagggg

SEQ ID NO: 2522 - DNA, 23 bp, Artificial Sequence
  sgRNA
gcagggaggggctgtccagcagg

SEQ ID NO: 2523 - DNA, 23 bp, Artificial Sequence
  sgRNA
tgtccagcaggtacttattaagg

SEQ ID NO: 2524 - DNA, 23 bp, Artificial Sequence
  sgRNA
gtacttattaaggaacaccatgg

SEQ ID NO: 2525 - DNA, 23 bp, Artificial Sequence
  sgRNA
attaaggaacaccatggagatgg

SEQ ID NO: 2526 - DNA, 23 bp, Artificial Sequence
  sgRNA
aaggaacaccatggagatggagg

SEQ ID NO: 2527 - DNA, 23 bp, Artificial Sequence
  sgRNA
agatggaggtgacccagtagagg

SEQ ID NO: 2528 - DNA, 23 bp, Artificial Sequence
  sgRNA
gatggaggtgacccagtagaggg

SEQ ID NO: 2529 - DNA, 23 bp, Artificial Sequence
  sgRNA
ctgcaatgcccgcagcagaaagg

SEQ ID NO: 2530 - DNA, 23 bp, Artificial Sequence
  sgRNA
tgcaatgcccgcagcagaaaggg

SEQ ID NO: 2531 - DNA, 23 bp, Artificial Sequence
  sgRNA
cagaaagggcttctccccgttgg

SEQ ID NO: 2532 - DNA, 23 bp, Artificial Sequence
  sgRNA
gttggcctctgcctctgcagagg

SEQ ID NO: 2533 - DNA, 23 bp, Artificial Sequence
  sgRNA
ttggcctctgcctctgcagaggg

SEQ ID NO: 2534 - DNA, 23 bp, Artificial Sequence
  sgRNA
tggcctctgcctctgcagagggg

SEQ ID NO: 2535 - DNA, 23 bp, Artificial Sequence
  sgRNA
tgcctctgcagaggggtctgagg

SEQ ID NO: 2536 - DNA, 23 bp, Artificial Sequence
  sgRNA
tgcagaggggtctgaggccccgg

SEQ ID NO: 2537 - DNA, 23 bp, Artificial Sequence
  sgRNA
ccccggtcagcgccatgtgcagg

SEQ ID NO: 2538 - DNA, 23 bp, Artificial Sequence
  sgRNA
cagcgccatgtgcaggatcctgg

SEQ ID NO: 2539 - DNA, 23 bp, Artificial Sequence
  sgRNA
aggatcctggaccgcttcagagg

SEQ ID NO: 2540 - DNA, 23 bp, Artificial Sequence
  sgRNA
ggatcctggaccgcttcagaggg

SEQ ID NO: 2541 - DNA, 23 bp, Artificial Sequence
  sgRNA
gatcctggaccgcttcagagggg

SEQ ID NO: 2542 - DNA, 23 bp, Artificial Sequence
  sgRNA
cttcagaggggccctattcatgg

SEQ ID NO: 2543 - DNA, 23 bp, Artificial Sequence
  sgRNA
ggccctattcatggtagcagagg

SEQ ID NO: 2544 - DNA, 23 bp, Artificial Sequence
  sgRNA
attcatggtagcagaggagctgg

SEQ ID NO: 2545 - DNA, 23 bp, Artificial Sequence
  sgRNA
ttcatggtagcagaggagctggg

SEQ ID NO: 2546 - DNA, 23 bp, Artificial Sequence
  sgRNA
agaggagctgggtcaccccgcgg

SEQ ID NO: 2547 - DNA, 23 bp, Artificial Sequence
  sgRNA
cggccagaactctgattccctgg

SEQ ID NO: 2548 - DNA, 23 bp, Artificial Sequence
  sgRNA
actctgattccctggagtccagg

SEQ ID NO: 2549 - DNA, 23 bp, Artificial Sequence
  sgRNA
ctctgattccctggagtccaggg

SEQ ID NO: 2550 - DNA, 23 bp, Artificial Sequence
  sgRNA
gctcacttgtgctctccgcaagg

SEQ ID NO: 2551 - DNA, 23 bp, Artificial Sequence
  sgRNA
cagccctccattgtcacatgtgg

SEQ ID NO: 2552 - DNA, 23 bp, Artificial Sequence
  sgRNA
agccctccattgtcacatgtggg

SEQ ID NO: 2553 - DNA, 23 bp, Artificial Sequence
  sgRNA
ctccattgtcacatgtgggctgg

SEQ ID NO: 2554 - DNA, 23 bp, Artificial Sequence
  sgRNA
tcacatgtgggctggcctaaagg

SEQ ID NO: 2555 - DNA, 23 bp, Artificial Sequence
  sgRNA
aggcctccccattgtcctcatgg

SEQ ID NO: 2556 - DNA, 23 bp, Artificial Sequence
  sgRNA
tggattgagaagttctgctttgg

SEQ ID NO: 2557 - DNA, 23 bp, Artificial Sequence
  sgRNA
ggattgagaagttctgctttggg

SEQ ID NO: 2558 - DNA, 23 bp, Artificial Sequence
  sgRNA
gattgagaagttctgctttgggg

SEQ ID NO: 2559 - DNA, 23 bp, Artificial Sequence
  sgRNA
cacaacctactcccaccccgagg

SEQ ID NO: 2560 - DNA, 23 bp, Artificial Sequence
  sgRNA
acaacctactcccaccccgaggg

SEQ ID NO: 2561 - DNA, 23 bp, Artificial Sequence
  sgRNA
caacctactcccaccccgagggg

SEQ ID NO: 2562 - DNA, 23 bp, Artificial Sequence
  sgRNA
aacctactcccaccccgaggggg

SEQ ID NO: 2563 - DNA, 23 bp, Artificial Sequence
  sgRNA
ggggctctgagacaagacacagg

SEQ ID NO: 2564 - DNA, 23 bp, Artificial Sequence
  sgRNA
gggctctgagacaagacacaggg

SEQ ID NO: 2565 - DNA, 23 bp, Artificial Sequence
  sgRNA
ctgagacaagacacagggcaagg

SEQ ID NO: 2566 - DNA, 23 bp, Artificial Sequence
  sgRNA
tgagacaagacacagggcaaggg

SEQ ID NO: 2567 - DNA, 23 bp, Artificial Sequence
  sgRNA
caagacacagggcaagggagagg

SEQ ID NO: 2568 - DNA, 23 bp, Artificial Sequence
  sgRNA
acagggcaagggagaggaatagg

SEQ ID NO: 2569 - DNA, 23 bp, Artificial Sequence
  sgRNA
caagggagaggaataggataagg

SEQ ID NO: 2570 - DNA, 23 bp, Artificial Sequence
  sgRNA
gggagaggaataggataaggcgg

SEQ ID NO: 2571 - DNA, 23 bp, Artificial Sequence
  sgRNA
aggaataggataaggcggtgagg

SEQ ID NO: 2572 - DNA, 23 bp, Artificial Sequence
  sgRNA
taggataaggcggtgaggccagg

SEQ ID NO: 2573 - DNA, 23 bp, Artificial Sequence
  sgRNA
caggacagagaagacctgtgagg

SEQ ID NO: 2574 - DNA, 23 bp, Artificial Sequence
  sgRNA
aggacagagaagacctgtgaggg

SEQ ID NO: 2575 - DNA, 23 bp, Artificial Sequence
  sgRNA
ggacagagaagacctgtgagggg

SEQ ID NO: 2576 - DNA, 23 bp, Artificial Sequence
  sgRNA
aagacctgtgaggggagaagagg

SEQ ID NO: 2577 - DNA, 23 bp, Artificial Sequence
  sgRNA
cctgtgaggggagaagaggctgg

SEQ ID NO: 2578 - DNA, 23 bp, Artificial Sequence
  sgRNA
ctgtgaggggagaagaggctggg

SEQ ID NO: 2579 - DNA, 23 bp, Artificial Sequence
  sgRNA
tgtgaggggagaagaggctgggg

SEQ ID NO: 2580 - DNA, 23 bp, Artificial Sequence
  sgRNA
agaagaggctggggcctaacagg

SEQ ID NO: 2581 - DNA, 23 bp, Artificial Sequence
  sgRNA
gaagaggctggggcctaacaggg

SEQ ID NO: 2582 - DNA, 23 bp, Artificial Sequence
  sgRNA
gaggctggggcctaacagggagg

SEQ ID NO: 2583 - DNA, 23 bp, Artificial Sequence
  sgRNA
aggctggggcctaacagggaggg

SEQ ID NO: 2584 - DNA, 23 bp, Artificial Sequence
  sgRNA
ggctggggcctaacagggagggg

SEQ ID NO: 2585 - DNA, 23 bp, Artificial Sequence
  sgRNA
agggaggggtcgcagagagaagg

SEQ ID NO: 2586 - DNA, 23 bp, Artificial Sequence
  sgRNA
gggaggggtcgcagagagaaggg

SEQ ID NO: 2587 - DNA, 23 bp, Artificial Sequence
  sgRNA
aggggtcgcagagagaagggagg

SEQ ID NO: 2588 - DNA, 23 bp, Artificial Sequence
  sgRNA
ggggtcgcagagagaagggaggg

SEQ ID NO: 2589 - DNA, 23 bp, Artificial Sequence
  sgRNA
gggtcgcagagagaagggagggg

SEQ ID NO: 2590 - DNA, 23 bp, Artificial Sequence
  sgRNA
gcagagagaagggaggggagagg

SEQ ID NO: 2591 - DNA, 23 bp, Artificial Sequence
  sgRNA
gagaagggaggggagaggaatgg

SEQ ID NO: 2592 - DNA, 23 bp, Artificial Sequence
  sgRNA
agggaggggagaggaatggcagg

SEQ ID NO: 2593 - DNA, 23 bp, Artificial Sequence
  sgRNA
gggaggggagaggaatggcaggg

SEQ ID NO: 2594 - DNA, 23 bp, Artificial Sequence
  sgRNA
aggggagaggaatggcagggcgg

SEQ ID NO: 2595 - DNA, 23 bp, Artificial Sequence
  sgRNA
ggggagaggaatggcagggcggg

SEQ ID NO: 2596 - DNA, 23 bp, Artificial Sequence
  sgRNA
gggagaggaatggcagggcgggg

SEQ ID NO: 2597 - DNA, 23 bp, Artificial Sequence
  sgRNA
gaggaatggcagggcggggcagg

SEQ ID NO: 2598 - DNA, 23 bp, Artificial Sequence
  sgRNA
tggcagggcggggcaggagtagg

SEQ ID NO: 2599 - DNA, 23 bp, Artificial Sequence
  sgRNA
gcggggcaggagtaggtacgcgg

SEQ ID NO: 2600 - DNA, 23 bp, Artificial Sequence
  sgRNA
cggggcaggagtaggtacgcggg

SEQ ID NO: 2601 - DNA, 23 bp, Artificial Sequence
  sgRNA
ggggcaggagtaggtacgcgggg

SEQ ID NO: 2602 - DNA, 23 bp, Artificial Sequence
  sgRNA
ggagtaggtacgcggggcgaagg

SEQ ID NO: 2603 - DNA, 23 bp, Artificial Sequence
  sgRNA
ggtacgcggggcgaaggtgcagg

SEQ ID NO: 2604 - DNA, 23 bp, Artificial Sequence
  sgRNA
cggggcgaaggtgcaggaaaagg

SEQ ID NO: 2605 - DNA, 23 bp, Artificial Sequence
  sgRNA
aggtgcaggaaaaggacgcgtgg

SEQ ID NO: 2606 - DNA, 23 bp, Artificial Sequence
  sgRNA
gaaaaggacgcgtggcagagtgg

SEQ ID NO: 2607 - DNA, 23 bp, Artificial Sequence
  sgRNA
aaaaggacgcgtggcagagtggg

SEQ ID NO: 2608 - DNA, 23 bp, Artificial Sequence
  sgRNA
acgcgtggcagagtgggaagagg

SEQ ID NO: 2609 - DNA, 23 bp, Artificial Sequence
  sgRNA
gagtgggaagaggtgccgagagg

SEQ ID NO: 2610 - DNA, 23 bp, Artificial Sequence
  sgRNA
agtgggaagaggtgccgagaggg

SEQ ID NO: 2611 - DNA, 23 bp, Artificial Sequence
  sgRNA
gaggtgccgagagggcgtcatgg

SEQ ID NO: 2612 - DNA, 23 bp, Artificial Sequence
  sgRNA
aggtgccgagagggcgtcatggg

SEQ ID NO: 2613 - DNA, 23 bp, Artificial Sequence
  sgRNA
tgccgagagggcgtcatgggcgg

SEQ ID NO: 2614 - DNA, 23 bp, Artificial Sequence
  sgRNA
gagggcgtcatgggcggctgtgg

SEQ ID NO: 2615 - DNA, 23 bp, Artificial Sequence
  sgRNA
agggcgtcatgggcggctgtggg

SEQ ID NO: 2616 - DNA, 23 bp, Artificial Sequence
  sgRNA
gcgtcatgggcggctgtgggagg

SEQ ID NO: 2617 - DNA, 23 bp, Artificial Sequence
  sgRNA
cgtcatgggcggctgtgggaggg

SEQ ID NO: 2618 - DNA, 23 bp, Artificial Sequence
  sgRNA
catgggcggctgtgggagggagg

SEQ ID NO: 2619 - DNA, 23 bp, Artificial Sequence
  sgRNA
atgggcggctgtgggagggaggg

SEQ ID NO: 2620 - DNA, 23 bp, Artificial Sequence
  sgRNA
tgggcggctgtgggagggagggg

SEQ ID NO: 2621 - DNA, 23 bp, Artificial Sequence
  sgRNA
gcggctgtgggagggaggggcgg

SEQ ID NO: 2622 - DNA, 23 bp, Artificial Sequence
  sgRNA
cggctgtgggagggaggggcggg

SEQ ID NO: 2623 - DNA, 23 bp, Artificial Sequence
  sgRNA
tgtgggagggaggggcgggcagg

SEQ ID NO: 2624 - DNA, 23 bp, Artificial Sequence
  sgRNA
gtgggagggaggggcgggcaggg

SEQ ID NO: 2625 - DNA, 23 bp, Artificial Sequence
  sgRNA
tgggagggaggggcgggcagggg

SEQ ID NO: 2626 - DNA, 23 bp, Artificial Sequence
  sgRNA
gggagggaggggcgggcaggggg

SEQ ID NO: 2627 - DNA, 23 bp, Artificial Sequence
  sgRNA
agggaggggcgggcagggggagg

SEQ ID NO: 2628 - DNA, 23 bp, Artificial Sequence
  sgRNA
gggaggggcgggcagggggaggg

SEQ ID NO: 2629 - DNA, 23 bp, Artificial Sequence
  sgRNA
aggggcgggcagggggagggagg

SEQ ID NO: 2630 - DNA, 23 bp, Artificial Sequence
  sgRNA
gcagggggagggaggcgtacagg

SEQ ID NO: 2631 - DNA, 23 bp, Artificial Sequence
  sgRNA
cagggggagggaggcgtacaggg

SEQ ID NO: 2632 - DNA, 23 bp, Artificial Sequence
  sgRNA
ggaggcgtacagggagctgccgg

SEQ ID NO: 2633 - DNA, 23 bp, Artificial Sequence
  sgRNA
ggcgtacagggagctgccggagg

SEQ ID NO: 2634 - DNA, 23 bp, Artificial Sequence
  sgRNA
tacagggagctgccggaggccgg

SEQ ID NO: 2635 - DNA, 23 bp, Artificial Sequence
  sgRNA
acagggagctgccggaggccggg

SEQ ID NO: 2636 - DNA, 23 bp, Artificial Sequence
  sgRNA
gagctgccggaggccgggcgcgg

SEQ ID NO: 2637 - DNA, 23 bp, Artificial Sequence
  sgRNA
tgccggaggccgggcgcggctgg

SEQ ID NO: 2638 - DNA, 23 bp, Artificial Sequence
  sgRNA
cggaggccgggcgcggctggagg

SEQ ID NO: 2639 - DNA, 23 bp, Artificial Sequence
  sgRNA
ggaggccgggcgcggctggaggg

SEQ ID NO: 2640 - DNA, 23 bp, Artificial Sequence
  sgRNA
ggccgggcgcggctggagggagg

SEQ ID NO: 2641 - DNA, 23 bp, Artificial Sequence
  sgRNA
gccgggcgcggctggagggaggg

SEQ ID NO: 2642 - DNA, 23 bp, Artificial Sequence
  sgRNA
cgcggctggagggagggctgcgg

SEQ ID NO: 2643 - DNA, 23 bp, Artificial Sequence
  sgRNA
gctggagggagggctgcggaagg

SEQ ID NO: 2644 - DNA, 23 bp, Artificial Sequence
  sgRNA
ctggagggagggctgcggaaggg

SEQ ID NO: 2645 - DNA, 23 bp, Artificial Sequence
  sgRNA
gagggctgcggaagggtcagagg

SEQ ID NO: 2646 - DNA, 23 bp, Artificial Sequence
  sgRNA
agggctgcggaagggtcagaggg

SEQ ID NO: 2647 - DNA, 23 bp, Artificial Sequence
  sgRNA
gggctgcggaagggtcagagggg

SEQ ID NO: 2648 - DNA, 23 bp, Artificial Sequence
  sgRNA
gcggaagggtcagaggggctcgg

SEQ ID NO: 2649 - DNA, 23 bp, Artificial Sequence
  sgRNA
cggaagggtcagaggggctcggg

SEQ ID NO: 2650 - DNA, 23 bp, Artificial Sequence
  sgRNA
ggaagggtcagaggggctcgggg

SEQ ID NO: 2651 - DNA, 23 bp, Artificial Sequence
  sgRNA
ggtcagaggggctcggggcttgg

SEQ ID NO: 2652 - DNA, 23 bp, Artificial Sequence
  sgRNA
gtcagaggggctcggggcttggg

SEQ ID NO: 2653 - DNA, 23 bp, Artificial Sequence
  sgRNA
tcagaggggctcggggcttgggg

SEQ ID NO: 2654 - DNA, 23 bp, Artificial Sequence
  sgRNA
ggctcggggcttggggctgaagg

SEQ ID NO: 2655 - DNA, 23 bp, Artificial Sequence
  sgRNA
gggcttggggctgaaggacgcgg

SEQ ID NO: 2656 - DNA, 23 bp, Artificial Sequence
  sgRNA
ggcttggggctgaaggacgcggg

SEQ ID NO: 2657 - DNA, 23 bp, Artificial Sequence
  sgRNA
ttggggctgaaggacgcgggagg

SEQ ID NO: 2658 - DNA, 23 bp, Artificial Sequence
  sgRNA
tggggctgaaggacgcgggaggg

SEQ ID NO: 2659 - DNA, 23 bp, Artificial Sequence
  sgRNA
ggggctgaaggacgcgggagggg

SEQ ID NO: 2660 - DNA, 23 bp, Artificial Sequence
  sgRNA
gggctgaaggacgcgggaggggg

SEQ ID NO: 2661 - DNA, 23 bp, Artificial Sequence
  sgRNA
tgaaggacgcgggagggggctgg

SEQ ID NO: 2662 - DNA, 23 bp, Artificial Sequence
  sgRNA
gaaggacgcgggagggggctggg

SEQ ID NO: 2663 - DNA, 23 bp, Artificial Sequence
  sgRNA
gacgcgggagggggctgggccgg

SEQ ID NO: 2664 - DNA, 23 bp, Artificial Sequence
  sgRNA
cccacgtctcgctgccttcccgg

SEQ ID NO: 2665 - DNA, 23 bp, Artificial Sequence
  sgRNA
ccacgtctcgctgccttcccggg

SEQ ID NO: 2666 - DNA, 23 bp, Artificial Sequence
  sgRNA
gccttcccgggctctgtcgccgg

SEQ ID NO: 2667 - DNA, 23 bp, Artificial Sequence
  sgRNA
ctctgtcgccggctcagcccagg

SEQ ID NO: 2668 - DNA, 23 bp, Artificial Sequence
  sgRNA
cggctcagcccaggagcctccgg

SEQ ID NO: 2669 - DNA, 23 bp, Artificial Sequence
  sgRNA
caggagcctccggacatccgagg

SEQ ID NO: 2670 - DNA, 23 bp, Artificial Sequence
  sgRNA
gacatccgaggccgactccccgg

SEQ ID NO: 2671 - DNA, 23 bp, Artificial Sequence
  sgRNA
acatccgaggccgactccccggg

SEQ ID NO: 2672 - DNA, 23 bp, Artificial Sequence
  sgRNA
tccgaggccgactccccgggagg

SEQ ID NO: 2673 - DNA, 23 bp, Artificial Sequence
  sgRNA
gaggccgactccccgggaggcgg

SEQ ID NO: 2674 - DNA, 23 bp, Artificial Sequence
  sgRNA
aggccgactccccgggaggcggg

SEQ ID NO: 2675 - DNA, 23 bp, Artificial Sequence
  sgRNA
actccccgggaggcgggccctgg

SEQ ID NO: 2676 - DNA, 23 bp, Artificial Sequence
  sgRNA
cttcctgacacgcccccacgtgg

SEQ ID NO: 2677 - DNA, 23 bp, Artificial Sequence
  sgRNA
acgcccccacgtggccttaaagg

SEQ ID NO: 2678 - DNA, 23 bp, Artificial Sequence
  sgRNA
cgcccccacgtggccttaaaggg

SEQ ID NO: 2679 - DNA, 23 bp, Artificial Sequence
  sgRNA
ttaaagcgacagccccagagagg

SEQ ID NO: 2680 - DNA, 23 bp, Artificial Sequence
  sgRNA
aagcgacagccccagagaggcgg

SEQ ID NO: 2681 - DNA, 23 bp, Artificial Sequence
  sgRNA
tgcgctccgctgcccgctgctgg

SEQ ID NO: 2682 - DNA, 23 bp, Artificial Sequence
  sgRNA
gctccgctgcccgctgctggcgg

SEQ ID NO: 2683 - DNA, 23 bp, Artificial Sequence
  sgRNA
ctccgctgcccgctgctggcggg

SEQ ID NO: 2684 - DNA, 23 bp, Artificial Sequence
  sgRNA
tccgctgcccgctgctggcgggg

SEQ ID NO: 2685 - DNA, 23 bp, Artificial Sequence
  sgRNA
ccgctgcccgctgctggcggggg

SEQ ID NO: 2686 - DNA, 23 bp, Artificial Sequence
  sgRNA
ccgctgctggcgggggacctcgg

SEQ ID NO: 2687 - DNA, 23 bp, Artificial Sequence
  sgRNA
cgggggacctcggcagccacagg

SEQ ID NO: 2688 - DNA, 23 bp, Artificial Sequence
  sgRNA
tcggcagccacaggtttttctgg

SEQ ID NO: 2689 - DNA, 23 bp, Artificial Sequence
  sgRNA
cggcagccacaggtttttctggg

SEQ ID NO: 2690 - DNA, 23 bp, Artificial Sequence
  sgRNA
ttgagcctcgccctgcttcctgg

SEQ ID NO: 2691 - DNA, 23 bp, Artificial Sequence
  sgRNA
gcctcgccctgcttcctggaagg

SEQ ID NO: 2692 - DNA, 23 bp, Artificial Sequence
  sgRNA
cctcgccctgcttcctggaaggg

SEQ ID NO: 2693 - DNA, 23 bp, Artificial Sequence
  sgRNA
accctcagctccgtccgccccgg

SEQ ID NO: 2694 - DNA, 23 bp, Artificial Sequence
  sgRNA
ggagcctccgtcccccgacttgg

SEQ ID NO: 2695 - DNA, 23 bp, Artificial Sequence
  sgRNA
ctccgtcccccgacttggctagg

SEQ ID NO: 2696 - DNA, 23 bp, Artificial Sequence
  sgRNA
tcccccgacttggctaggcttgg

SEQ ID NO: 2697 - DNA, 23 bp, Artificial Sequence
  sgRNA
cttggctaggcttggctcgcagg

SEQ ID NO: 2698 - DNA, 23 bp, Artificial Sequence
  sgRNA
tggctcgcaggtccacttcccgg

SEQ ID NO: 2699 - DNA, 23 bp, Artificial Sequence
  sgRNA
acttcccggaaccccgacccagg

SEQ ID NO: 2700 - DNA, 23 bp, Artificial Sequence
  sgRNA
cggaaccccgacccaggacccgg

SEQ ID NO: 2701 - DNA, 23 bp, Artificial Sequence
  sgRNA
ggaaccccgacccaggacccggg

SEQ ID NO: 2702 - DNA, 23 bp, Artificial Sequence
  sgRNA
accccgacccaggacccgggcgg

SEQ ID NO: 2703 - DNA, 23 bp, Artificial Sequence
  sgRNA
cgggcggcgctacatcagcctgg

SEQ ID NO: 2704 - DNA, 23 bp, Artificial Sequence
  sgRNA
agcctggacccctccacctccgg

SEQ ID NO: 2705 - DNA, 23 bp, Artificial Sequence
  sgRNA
actcttccataacaatgttgtgg

SEQ ID NO: 2706 - DNA, 23 bp, Artificial Sequence
  sgRNA
cccccattttcaccgcccccagg

SEQ ID NO: 2707 - DNA, 23 bp, Artificial Sequence
  sgRNA
tctcccaagcccgagacccccgg

SEQ ID NO: 2708 - DNA, 23 bp, Artificial Sequence
  sgRNA
acccccggcagcgctccccgagg

SEQ ID NO: 2709 - DNA, 23 bp, Artificial Sequence
  sgRNA
ccggcagcgctccccgaggccgg

SEQ ID NO: 2710 - DNA, 23 bp, Artificial Sequence
  sgRNA
gcagcgctccccgaggccggagg

SEQ ID NO: 2711 - DNA, 23 bp, Artificial Sequence
  sgRNA
ggaggccacgccgcctctctcgg

SEQ ID NO: 2712 - DNA, 23 bp, Artificial Sequence
  sgRNA
tcctccctgtgctcctgtcgagg

SEQ ID NO: 2713 - DNA, 23 bp, Artificial Sequence
  sgRNA
gtgctcctgtcgaggtcctctgg

SEQ ID NO: 2714 - DNA, 23 bp, Artificial Sequence
  sgRNA
tgctcctgtcgaggtcctctggg

SEQ ID NO: 2715 - DNA, 23 bp, Artificial Sequence
  sgRNA
tcctgtcgaggtcctctgggcgg

SEQ ID NO: 2716 - DNA, 23 bp, Artificial Sequence
  sgRNA
tcgaggtcctctgggcggcccgg

SEQ ID NO: 2717 - DNA, 23 bp, Artificial Sequence
  sgRNA
gcccggatccgagattccaaagg

SEQ ID NO: 2718 - DNA, 23 bp, Artificial Sequence
  sgRNA
tccagaaaatactgtttccccgg

SEQ ID NO: 2719 - DNA, 23 bp, Artificial Sequence
  sgRNA
gaaaatactgtttccccggccgg

SEQ ID NO: 2720 - DNA, 23 bp, Artificial Sequence
  sgRNA
cgcgtccctgcctgtgtccccgg

SEQ ID NO: 2721 - DNA, 23 bp, Artificial Sequence
  sgRNA
gcgtccctgcctgtgtccccggg

SEQ ID NO: 2722 - DNA, 23 bp, Artificial Sequence
  sgRNA
cctgtgtccccgggccgcgaagg

SEQ ID NO: 2723 - DNA, 23 bp, Artificial Sequence
  sgRNA
cccgggccgcgaaggcgacctgg

SEQ ID NO: 2724 - DNA, 23 bp, Artificial Sequence
  sgRNA
gacctggcgctcacctcctccgg

SEQ ID NO: 2725 - DNA, 23 bp, Artificial Sequence
  sgRNA
tattgaatcacaaacaactcagg

SEQ ID NO: 2726 - DNA, 23 bp, Artificial Sequence
  sgRNA
attgaatcacaaacaactcaggg

SEQ ID NO: 2727 - DNA, 23 bp, Artificial Sequence
  sgRNA
cacaaacaactcagggcatcagg

SEQ ID NO: 2728 - DNA, 23 bp, Artificial Sequence
  sgRNA
cagctgcattagaacccatctgg

SEQ ID NO: 2729 - DNA, 23 bp, Artificial Sequence
  sgRNA
agctgcattagaacccatctggg

SEQ ID NO: 2730 - DNA, 23 bp, Artificial Sequence
  sgRNA
agaacccatctgggattgtgagg

SEQ ID NO: 2731 - DNA, 23 bp, Artificial Sequence
  sgRNA
gaacccatctgggattgtgaggg

SEQ ID NO: 2732 - DNA, 23 bp, Artificial Sequence
  sgRNA
aacccatctgggattgtgagggg

SEQ ID NO: 2733 - DNA, 23 bp, Artificial Sequence
  sgRNA
atctgggattgtgaggggactgg

SEQ ID NO: 2734 - DNA, 23 bp, Artificial Sequence
  sgRNA
ggattgtgaggggactggagagg

SEQ ID NO: 2735 - DNA, 23 bp, Artificial Sequence
  sgRNA
gattgtgaggggactggagaggg

SEQ ID NO: 2736 - DNA, 23 bp, Artificial Sequence
  sgRNA
tgtgaggggactggagagggagg

SEQ ID NO: 2737 - DNA, 23 bp, Artificial Sequence
  sgRNA
gtgaggggactggagagggaggg

SEQ ID NO: 2738 - DNA, 23 bp, Artificial Sequence
  sgRNA
tgaggggactggagagggagggg

SEQ ID NO: 2739 - DNA, 23 bp, Artificial Sequence
  sgRNA
gaggggactggagagggaggggg

SEQ ID NO: 2740 - DNA, 23 bp, Artificial Sequence
  sgRNA
aggggactggagagggagggggg

SEQ ID NO: 2741 - DNA, 23 bp, Artificial Sequence
  sgRNA
cagaaatcaccccaagagaaagg

SEQ ID NO: 2742 - DNA, 23 bp, Artificial Sequence
  sgRNA
cataccaaatgcccaccagaagg

SEQ ID NO: 2743 - DNA, 23 bp, Artificial Sequence
  sgRNA
ataccaaatgcccaccagaaggg

SEQ ID NO: 2744 - DNA, 23 bp, Artificial Sequence
  sgRNA
aaatgcccaccagaagggccagg

SEQ ID NO: 2745 - DNA, 23 bp, Artificial Sequence
  sgRNA
aatgcccaccagaagggccaggg

SEQ ID NO: 2746 - DNA, 23 bp, Artificial Sequence
  sgRNA
ctgcaagccaccctgagcgcagg

SEQ ID NO: 2747 - DNA, 23 bp, Artificial Sequence
  sgRNA
caagccaccctgagcgcaggagg

SEQ ID NO: 2748 - DNA, 23 bp, Artificial Sequence
  sgRNA
aagccaccctgagcgcaggaggg

SEQ ID NO: 2749 - DNA, 23 bp, Artificial Sequence
  sgRNA
accctgagcgcaggagggtgtgg

SEQ ID NO: 2750 - DNA, 23 bp, Artificial Sequence
  sgRNA
agcgcaggagggtgtggtgaagg

SEQ ID NO: 2751 - DNA, 23 bp, Artificial Sequence
  sgRNA
gcgcaggagggtgtggtgaaggg

SEQ ID NO: 2752 - DNA, 23 bp, Artificial Sequence
  sgRNA
caggagggtgtggtgaagggtgg

SEQ ID NO: 2753 - DNA, 23 bp, Artificial Sequence
  sgRNA
gggtgtggtgaagggtggtatgg

SEQ ID NO: 2754 - DNA, 23 bp, Artificial Sequence
  sgRNA
ctccccctgcaaattcacattgg

SEQ ID NO: 2755 - DNA, 23 bp, Artificial Sequence
  sgRNA
cattggaattctcacccccaagg

SEQ ID NO: 2756 - DNA, 23 bp, Artificial Sequence
  sgRNA
acccccaaggtgacagtattagg

SEQ ID NO: 2757 - DNA, 23 bp, Artificial Sequence
  sgRNA
cccaaggtgacagtattaggagg

SEQ ID NO: 2758 - DNA, 23 bp, Artificial Sequence
  sgRNA
aaggtgacagtattaggaggtgg

SEQ ID NO: 2759 - DNA, 23 bp, Artificial Sequence
  sgRNA
aggtgacagtattaggaggtggg

SEQ ID NO: 2760 - DNA, 23 bp, Artificial Sequence
  sgRNA
ggtgacagtattaggaggtgggg

SEQ ID NO: 2761 - DNA, 23 bp, Artificial Sequence
  sgRNA
gtattaggaggtggggcctttgg

SEQ ID NO: 2762 - DNA, 23 bp, Artificial Sequence
  sgRNA
gtggggcctttggagctgattgg

SEQ ID NO: 2763 - DNA, 23 bp, Artificial Sequence
  sgRNA
tggggcctttggagctgattggg

SEQ ID NO: 2764 - DNA, 23 bp, Artificial Sequence
  sgRNA
ctttggagctgattgggtcatgg

SEQ ID NO: 2765 - DNA, 23 bp, Artificial Sequence
  sgRNA
tttggagctgattgggtcatggg

SEQ ID NO: 2766 - DNA, 23 bp, Artificial Sequence
  sgRNA
ttggagctgattgggtcatgggg

SEQ ID NO: 2767 - DNA, 23 bp, Artificial Sequence
  sgRNA
tggagctgattgggtcatggggg

SEQ ID NO: 2768 - DNA, 23 bp, Artificial Sequence
  sgRNA
agctgattgggtcatgggggcgg

SEQ ID NO: 2769 - DNA, 23 bp, Artificial Sequence
  sgRNA
ggggcggaaccctcatgaacagg

SEQ ID NO: 2770 - DNA, 23 bp, Artificial Sequence
  sgRNA
gggcggaaccctcatgaacaggg

SEQ ID NO: 2771 - DNA, 23 bp, Artificial Sequence
  sgRNA
ggaaccctcatgaacagggttgg

SEQ ID NO: 2772 - DNA, 23 bp, Artificial Sequence
  sgRNA
ggttggagtccttataaaagagg

SEQ ID NO: 2773 - DNA, 23 bp, Artificial Sequence
  sgRNA
ggagtccttataaaagaggcagg

SEQ ID NO: 2774 - DNA, 23 bp, Artificial Sequence
  sgRNA
tccttataaaagaggcaggaagg

SEQ ID NO: 2775 - DNA, 23 bp, Artificial Sequence
  sgRNA
tgtttgtgcttctaccattgagg

SEQ ID NO: 2776 - DNA, 23 bp, Artificial Sequence
  sgRNA
ccattgaggatacagcgagaagg

SEQ ID NO: 2777 - DNA, 23 bp, Artificial Sequence
  sgRNA
cagcgagaaggcaccatctatgg

SEQ ID NO: 2778 - DNA, 23 bp, Artificial Sequence
  sgRNA
agaaggcaccatctatggatcgg

SEQ ID NO: 2779 - DNA, 23 bp, Artificial Sequence
  sgRNA
gaaggcaccatctatggatcggg

SEQ ID NO: 2780 - DNA, 23 bp, Artificial Sequence
  sgRNA
gatcgggaaacagccctcagcgg

SEQ ID NO: 2781 - DNA, 23 bp, Artificial Sequence
  sgRNA
tcagcggagtccgaatctgctgg

SEQ ID NO: 2782 - DNA, 23 bp, Artificial Sequence
  sgRNA
atctgctggcctcttgatcttgg

SEQ ID NO: 2783 - DNA, 23 bp, Artificial Sequence
  sgRNA
tctgctggcctcttgatcttggg

SEQ ID NO: 2784 - DNA, 23 bp, Artificial Sequence
  sgRNA
cttgggcgtcccagccccccagg

SEQ ID NO: 2785 - DNA, 23 bp, Artificial Sequence
  sgRNA
tctgttgtttgtaagccacccgg

SEQ ID NO: 2786 - DNA, 23 bp, Artificial Sequence
  sgRNA
tttgtaagccacccggcctacgg

SEQ ID NO: 2787 - DNA, 23 bp, Artificial Sequence
  sgRNA
ggcctacggcattttgatatagg

SEQ ID NO: 2788 - DNA, 23 bp, Artificial Sequence
  sgRNA
attttgatataggagctcgctgg

SEQ ID NO: 2789 - DNA, 23 bp, Artificial Sequence
  sgRNA
ggagctcgctggactaacagtgg

SEQ ID NO: 2790 - DNA, 23 bp, Artificial Sequence
  sgRNA
gagctcgctggactaacagtggg

SEQ ID NO: 2791 - DNA, 23 bp, Artificial Sequence
  sgRNA
agctcgctggactaacagtgggg

SEQ ID NO: 2792 - DNA, 23 bp, Artificial Sequence
  sgRNA
gactaacagtggggccaagcagg

SEQ ID NO: 2793 - DNA, 23 bp, Artificial Sequence
  sgRNA
gctctgtcagccacaacctcagg

SEQ ID NO: 2794 - DNA, 23 bp, Artificial Sequence
  sgRNA
ctctgtcagccacaacctcaggg

SEQ ID NO: 2795 - DNA, 23 bp, Artificial Sequence
  sgRNA
aacctcagggaagaatgtaaagg

SEQ ID NO: 2796 - DNA, 23 bp, Artificial Sequence
  sgRNA
tcagggaagaatgtaaaggttgg

SEQ ID NO: 2797 - DNA, 23 bp, Artificial Sequence
  sgRNA
gttggtgtcttaccatcacaagg

SEQ ID NO: 2798 - DNA, 23 bp, Artificial Sequence
  sgRNA
tcttaccatcacaaggcaagcgg

SEQ ID NO: 2799 - DNA, 23 bp, Artificial Sequence
  sgRNA
cacctcccttgcagagatctagg

SEQ ID NO: 2800 - DNA, 23 bp, Artificial Sequence
  sgRNA
acctcccttgcagagatctaggg

SEQ ID NO: 2801 - DNA, 23 bp, Artificial Sequence
  sgRNA
cctcccttgcagagatctagggg

SEQ ID NO: 2802 - DNA, 23 bp, Artificial Sequence
  sgRNA
ctaggggcgccagacacagctgg

SEQ ID NO: 2803 - DNA, 23 bp, Artificial Sequence
  sgRNA
taggggcgccagacacagctggg

SEQ ID NO: 2804 - DNA, 23 bp, Artificial Sequence
  sgRNA
aggggcgccagacacagctgggg

SEQ ID NO: 2805 - DNA, 23 bp, Artificial Sequence
  sgRNA
ggcgccagacacagctggggtgg

SEQ ID NO: 2806 - DNA, 23 bp, Artificial Sequence
  sgRNA
ccagacacagctggggtggaagg

SEQ ID NO: 2807 - DNA, 23 bp, Artificial Sequence
  sgRNA
ggggtggaaggctcctagtctgg

SEQ ID NO: 2808 - DNA, 23 bp, Artificial Sequence
  sgRNA
cttgctccatcagccccacctgg

SEQ ID NO: 2809 - DNA, 23 bp, Artificial Sequence
  sgRNA
ttgctccatcagccccacctggg

SEQ ID NO: 2810 - DNA, 23 bp, Artificial Sequence
  sgRNA
tgctccatcagccccacctgggg

SEQ ID NO: 2811 - DNA, 23 bp, Artificial Sequence
  sgRNA
tccatcagccccacctggggagg

SEQ ID NO: 2812 - DNA, 23 bp, Artificial Sequence
  sgRNA
tcagccccacctggggaggaagg

SEQ ID NO: 2813 - DNA, 23 bp, Artificial Sequence
  sgRNA
cacctggggaggaaggcttctgg

SEQ ID NO: 2814 - DNA, 23 bp, Artificial Sequence
  sgRNA
acctggggaggaaggcttctggg

SEQ ID NO: 2815 - DNA, 23 bp, Artificial Sequence
  sgRNA
cctggggaggaaggcttctgggg

SEQ ID NO: 2816 - DNA, 23 bp, Artificial Sequence
  sgRNA
ggggaggaaggcttctggggagg

SEQ ID NO: 2817 - DNA, 23 bp, Artificial Sequence
  sgRNA
ggcttctggggaggtagaactgg

SEQ ID NO: 2818 - DNA, 23 bp, Artificial Sequence
  sgRNA
gcttctggggaggtagaactggg

SEQ ID NO: 2819 - DNA, 23 bp, Artificial Sequence
  sgRNA
agaagagagaagcagctccttgg

SEQ ID NO: 2820 - DNA, 23 bp, Artificial Sequence
  sgRNA
tccttggctctgctttcagaagg

SEQ ID NO: 2821 - DNA, 23 bp, Artificial Sequence
  sgRNA
gctttcagaaggctgttacctgg

SEQ ID NO: 2822 - DNA, 23 bp, Artificial Sequence
  sgRNA
ctttcagaaggctgttacctggg

SEQ ID NO: 2823 - DNA, 23 bp, Artificial Sequence
  sgRNA
agaaggctgttacctgggccagg

SEQ ID NO: 2824 - DNA, 23 bp, Artificial Sequence
  sgRNA
ctgttacctgggccaggtgctgg

SEQ ID NO: 2825 - DNA, 23 bp, Artificial Sequence
  sgRNA
tgttacctgggccaggtgctggg

SEQ ID NO: 2826 - DNA, 23 bp, Artificial Sequence
  sgRNA
gccaggtgctgggagaccagagg

SEQ ID NO: 2827 - DNA, 23 bp, Artificial Sequence
  sgRNA
ccaggtgctgggagaccagaggg

SEQ ID NO: 2828 - DNA, 23 bp, Artificial Sequence
  sgRNA
tgctgggagaccagagggacagg

SEQ ID NO: 2829 - DNA, 23 bp, Artificial Sequence
  sgRNA
cagagggacaggtgccactcagg

SEQ ID NO: 2830 - DNA, 23 bp, Artificial Sequence
  sgRNA
agagggacaggtgccactcaggg

SEQ ID NO: 2831 - DNA, 23 bp, Artificial Sequence
  sgRNA
caggtgccactcagggccagagg

SEQ ID NO: 2832 - DNA, 23 bp, Artificial Sequence
  sgRNA
cagggccagaggagccacgcagg

SEQ ID NO: 2833 - DNA, 23 bp, Artificial Sequence
  sgRNA
acgcaggacaatgtgatgttagg

SEQ ID NO: 2834 - DNA, 23 bp, Artificial Sequence
  sgRNA
cgcaggacaatgtgatgttaggg

SEQ ID NO: 2835 - DNA, 23 bp, Artificial Sequence
  sgRNA
gacaatgtgatgttagggactgg

SEQ ID NO: 2836 - DNA, 23 bp, Artificial Sequence
  sgRNA
acaatgtgatgttagggactggg

SEQ ID NO: 2837 - DNA, 23 bp, Artificial Sequence
  sgRNA
caatgtgatgttagggactgggg

SEQ ID NO: 2838 - DNA, 23 bp, Artificial Sequence
  sgRNA
aatgtgatgttagggactggggg

SEQ ID NO: 2839 - DNA, 23 bp, Artificial Sequence
  sgRNA
gtgatgttagggactgggggagg

SEQ ID NO: 2840 - DNA, 23 bp, Artificial Sequence
  sgRNA
cttaacctctaagagaagcatgg

SEQ ID NO: 2841 - DNA, 23 bp, Artificial Sequence
  sgRNA
gttcccttgtgttcaaaagctgg

SEQ ID NO: 2842 - DNA, 23 bp, Artificial Sequence
  sgRNA
tgttcaaaagctggacatacagg

SEQ ID NO: 2843 - DNA, 23 bp, Artificial Sequence
  sgRNA
gttcaaaagctggacatacaggg

SEQ ID NO: 2844 - DNA, 23 bp, Artificial Sequence
  sgRNA
ggacatacagggtgtatagatgg

SEQ ID NO: 2845 - DNA, 23 bp, Artificial Sequence
  sgRNA
tcacaatccaccccattcccagg

SEQ ID NO: 2846 - DNA, 23 bp, Artificial Sequence
  sgRNA
ggccactgcccagcagcccctgg

SEQ ID NO: 2847 - DNA, 23 bp, Artificial Sequence
  sgRNA
gccactgcccagcagcccctggg

SEQ ID NO: 2848 - DNA, 23 bp, Artificial Sequence
  sgRNA
ccactgcccagcagcccctgggg

SEQ ID NO: 2849 - DNA, 23 bp, Artificial Sequence
  sgRNA
agcagcccctggggatctgctgg

SEQ ID NO: 2850 - DNA, 23 bp, Artificial Sequence
  sgRNA
tggggatctgctggtgtcagagg

SEQ ID NO: 2851 - DNA, 23 bp, Artificial Sequence
  sgRNA
ggggatctgctggtgtcagaggg

SEQ ID NO: 2852 - DNA, 23 bp, Artificial Sequence
  sgRNA
ctcatttcctccctcagtccagg

SEQ ID NO: 2853 - DNA, 23 bp, Artificial Sequence
  sgRNA
caggccacactttcctccaaagg

SEQ ID NO: 2854 - DNA, 23 bp, Artificial Sequence
  sgRNA
ccacactttcctccaaaggaagg

SEQ ID NO: 2855 - DNA, 23 bp, Artificial Sequence
  sgRNA
actttcctccaaaggaaggccgg

SEQ ID NO: 2856 - DNA, 23 bp, Artificial Sequence
  sgRNA
tccaaaggaaggccggtctgtgg

SEQ ID NO: 2857 - DNA, 23 bp, Artificial Sequence
  sgRNA
ccaaaggaaggccggtctgtggg

SEQ ID NO: 2858 - DNA, 23 bp, Artificial Sequence
  sgRNA
gaaggccggtctgtgggcccagg

SEQ ID NO: 2859 - DNA, 23 bp, Artificial Sequence
  sgRNA
aaggccggtctgtgggcccaggg

SEQ ID NO: 2860 - DNA, 23 bp, Artificial Sequence
  sgRNA
cggtctgtgggcccagggtgagg

SEQ ID NO: 2861 - DNA, 23 bp, Artificial Sequence
  sgRNA
ggctgcctgcccaccgcagacgg

SEQ ID NO: 2862 - DNA, 23 bp, Artificial Sequence
  sgRNA
gcctgcccaccgcagacggaagg

SEQ ID NO: 2863 - DNA, 23 bp, Artificial Sequence
  sgRNA
aaggcttcccaaccctctccagg

SEQ ID NO: 2864 - DNA, 23 bp, Artificial Sequence
  sgRNA
gcttcccaaccctctccaggtgg

SEQ ID NO: 2865 - DNA, 23 bp, Artificial Sequence
  sgRNA
caaccctctccaggtggctgtgg

SEQ ID NO: 2866 - DNA, 23 bp, Artificial Sequence
  sgRNA
cctctccaggtggctgtggtagg

SEQ ID NO: 2867 - DNA, 23 bp, Artificial Sequence
  sgRNA
ctctccaggtggctgtggtaggg

SEQ ID NO: 2868 - DNA, 23 bp, Artificial Sequence
  sgRNA
tgagtacagtgaagcctttgtgg

SEQ ID NO: 2869 - DNA, 23 bp, Artificial Sequence
  sgRNA
ttgccattgctgtcccttcaagg

SEQ ID NO: 2870 - DNA, 23 bp, Artificial Sequence
  sgRNA
tccctgtcctcagagtgatgtgg

SEQ ID NO: 2871 - DNA, 23 bp, Artificial Sequence
  sgRNA
ctgtcctcagagtgatgtggagg

SEQ ID NO: 2872 - DNA, 23 bp, Artificial Sequence
  sgRNA
agagtgatgtggaggcagacagg

SEQ ID NO: 2873 - DNA, 23 bp, Artificial Sequence
  sgRNA
atgtggaggcagacaggccctgg

SEQ ID NO: 2874 - DNA, 23 bp, Artificial Sequence
  sgRNA
tggaggcagacaggccctggagg

SEQ ID NO: 2875 - DNA, 23 bp, Artificial Sequence
  sgRNA
agacaggccctggaggcagaagg

SEQ ID NO: 2876 - DNA, 23 bp, Artificial Sequence
  sgRNA
aggccctggaggcagaaggaagg

SEQ ID NO: 2877 - DNA, 23 bp, Artificial Sequence
  sgRNA
ggccctggaggcagaaggaaggg

SEQ ID NO: 2878 - DNA, 23 bp, Artificial Sequence
  sgRNA
gccctggaggcagaaggaagggg

SEQ ID NO: 2879 - DNA, 23 bp, Artificial Sequence
  sgRNA
gaaggggttcaactctcactagg

SEQ ID NO: 2880 - DNA, 23 bp, Artificial Sequence
  sgRNA
aaggggttcaactctcactaggg

SEQ ID NO: 2881 - DNA, 23 bp, Artificial Sequence
  sgRNA
ctctcactagggtgctccctcgg

SEQ ID NO: 2882 - DNA, 23 bp, Artificial Sequence
  sgRNA
tctcactagggtgctccctcggg

SEQ ID NO: 2883 - DNA, 23 bp, Artificial Sequence
  sgRNA
actagggtgctccctcgggaagg

SEQ ID NO: 2884 - DNA, 23 bp, Artificial Sequence
  sgRNA
caaaaactcagaaatacgagagg

SEQ ID NO: 2885 - DNA, 23 bp, Artificial Sequence
  sgRNA
gaaatacgagaggatagagaagg

SEQ ID NO: 2886 - DNA, 23 bp, Artificial Sequence
  sgRNA
aaatacgagaggatagagaaggg

SEQ ID NO: 2887 - DNA, 23 bp, Artificial Sequence
  sgRNA
cgagaggatagagaagggtttgg

SEQ ID NO: 2888 - DNA, 23 bp, Artificial Sequence
  sgRNA
agaagggtttggcaactttctgg

SEQ ID NO: 2889 - DNA, 23 bp, Artificial Sequence
  sgRNA
ctggtattacttgtaaacactgg

SEQ ID NO: 2890 - DNA, 23 bp, Artificial Sequence
  sgRNA
ctgatattacttgtaaacactgg

SEQ ID NO: 2891 - DNA, 23 bp, Artificial Sequence
  sgRNA
ctcaaccaccgtattctgattgg

SEQ ID NO: 2892 - DNA, 23 bp, Artificial Sequence
  sgRNA
tcaaccaccgtattctgattggg

SEQ ID NO: 2893 - DNA, 23 bp, Artificial Sequence
  sgRNA
tccacaccacagcacgcttctgg

SEQ ID NO: 2894 - DNA, 23 bp, Artificial Sequence
  sgRNA
ccacaccacagcacgcttctggg

SEQ ID NO: 2895 - DNA, 23 bp, Artificial Sequence
  sgRNA
cacaccacagcacgcttctgggg

SEQ ID NO: 2896 - DNA, 23 bp, Artificial Sequence
  sgRNA
acagcacgcttctggggtccagg

SEQ ID NO: 2897 - DNA, 23 bp, Artificial Sequence
  sgRNA
gaccgccttcactactgtgctgg

SEQ ID NO: 2898 - DNA, 23 bp, Artificial Sequence
  sgRNA
gtgctggccccgcctgtgtacgg

SEQ ID NO: 2899 - DNA, 23 bp, Artificial Sequence
  sgRNA
tgctggccccgcctgtgtacggg

SEQ ID NO: 2900 - DNA, 23 bp, Artificial Sequence
  sgRNA
ccccgcctgtgtacgggccccgg

SEQ ID NO: 2901 - DNA, 23 bp, Artificial Sequence
  sgRNA
cccgcctgtgtacgggccccggg

SEQ ID NO: 2902 - DNA, 23 bp, Artificial Sequence
  sgRNA
ccgcctgtgtacgggccccgggg

SEQ ID NO: 2903 - DNA, 23 bp, Artificial Sequence
  sgRNA
ctgtgtacgggccccggggccgg

SEQ ID NO: 2904 - DNA, 23 bp, Artificial Sequence
  sgRNA
tgtgtacgggccccggggccggg

SEQ ID NO: 2905 - DNA, 23 bp, Artificial Sequence
  sgRNA
gccccggggccgggccatccagg

SEQ ID NO: 2906 - DNA, 23 bp, Artificial Sequence
  sgRNA
ccccggggccgggccatccaggg

SEQ ID NO: 2907 - DNA, 23 bp, Artificial Sequence
  sgRNA
cgggccatccagggtgcctgtgg

SEQ ID NO: 2908 - DNA, 23 bp, Artificial Sequence
  sgRNA
ctgtggtgctcacacccccatgg

SEQ ID NO: 2909 - DNA, 23 bp, Artificial Sequence
  sgRNA
ggcgctcttctcgctgtctttgg

SEQ ID NO: 2910 - DNA, 23 bp, Artificial Sequence
  sgRNA
gcgctcttctcgctgtctttggg

SEQ ID NO: 2911 - DNA, 23 bp, Artificial Sequence
  sgRNA
cgctcttctcgctgtctttgggg

SEQ ID NO: 2912 - DNA, 23 bp, Artificial Sequence
  sgRNA
cttctcgctgtctttggggctgg

SEQ ID NO: 2913 - DNA, 23 bp, Artificial Sequence
  sgRNA
ttctcgctgtctttggggctggg

SEQ ID NO: 2914 - DNA, 23 bp, Artificial Sequence
  sgRNA
tctttggggctgggctcctccgg

SEQ ID NO: 2915 - DNA, 23 bp, Artificial Sequence
  sgRNA
catctcccagcccctgacccagg

SEQ ID NO: 2916 - DNA, 23 bp, Artificial Sequence
  sgRNA
ccagcccctgacccaggtgtagg

SEQ ID NO: 2917 - DNA, 23 bp, Artificial Sequence
  sgRNA
gcccctgacccaggtgtaggcgg

SEQ ID NO: 2918 - DNA, 23 bp, Artificial Sequence
  sgRNA
cctgacccaggtgtaggcggagg

SEQ ID NO: 2919 - DNA, 23 bp, Artificial Sequence
  sgRNA
tcatgttgctcgtccaccagagg

SEQ ID NO: 2920 - DNA, 23 bp, Artificial Sequence
  sgRNA
cgtccaccagaggaagctcttgg

SEQ ID NO: 2921 - DNA, 23 bp, Artificial Sequence
  sgRNA
ggtctcctcgtagtagagcacgg

SEQ ID NO: 2922 - DNA, 23 bp, Artificial Sequence
  sgRNA
agagcacggccagcactgtctgg

SEQ ID NO: 2923 - DNA, 23 bp, Artificial Sequence
  sgRNA
gagcacggccagcactgtctggg

SEQ ID NO: 2924 - DNA, 23 bp, Artificial Sequence
  sgRNA
ggccagcactgtctgggcacagg

SEQ ID NO: 2925 - DNA, 23 bp, Artificial Sequence
  sgRNA
cactgtctgggcacaggccttgg

SEQ ID NO: 2926 - DNA, 23 bp, Artificial Sequence
  sgRNA
tggccgtgcccgacacattgtgg

SEQ ID NO: 2927 - DNA, 23 bp, Artificial Sequence
  sgRNA
ggccgtgcccgacacattgtggg

SEQ ID NO: 2928 - DNA, 23 bp, Artificial Sequence
  sgRNA
cccgacacattgtgggtcagcgg

SEQ ID NO: 2929 - DNA, 23 bp, Artificial Sequence
  sgRNA
cacattgtgggtcagcggactgg

SEQ ID NO: 2930 - DNA, 23 bp, Artificial Sequence
  sgRNA
cagtcctgtcacgtagccgatgg

SEQ ID NO: 2931 - DNA, 23 bp, Artificial Sequence
  sgRNA
agccgatggcaaagccaaacagg

SEQ ID NO: 2932 - DNA, 23 bp, Artificial Sequence
  sgRNA
gcgtcatcatcccccagaagtgg

SEQ ID NO: 2933 - DNA, 23 bp, Artificial Sequence
  sgRNA
cgtcatcatcccccagaagtggg

SEQ ID NO: 2934 - DNA, 23 bp, Artificial Sequence
  sgRNA
agaagtgggcactgcccagctgg

SEQ ID NO: 2935 - DNA, 23 bp, Artificial Sequence
  sgRNA
gaagtgggcactgcccagctggg

SEQ ID NO: 2936 - DNA, 23 bp, Artificial Sequence
  sgRNA
ccagctgggcaaagtcacgcagg

SEQ ID NO: 2937 - DNA, 23 bp, Artificial Sequence
  sgRNA
cagctgggcaaagtcacgcaggg

SEQ ID NO: 2938 - DNA, 23 bp, Artificial Sequence
  sgRNA
cctgaagctccccgagcagcagg

SEQ ID NO: 2939 - DNA, 23 bp, Artificial Sequence
  sgRNA
gctccccgagcagcaggagcagg

SEQ ID NO: 2940 - DNA, 23 bp, Artificial Sequence
  sgRNA
ctccccgagcagcaggagcaggg

SEQ ID NO: 2941 - DNA, 23 bp, Artificial Sequence
  sgRNA
tccccgagcagcaggagcagggg

SEQ ID NO: 2942 - DNA, 23 bp, Artificial Sequence
  sgRNA
cgagcagcaggagcaggggcagg

SEQ ID NO: 2943 - DNA, 23 bp, Artificial Sequence
  sgRNA
gcaggagcaggggcaggaagagg

SEQ ID NO: 2944 - DNA, 23 bp, Artificial Sequence
  sgRNA
caggggcaggaagaggatgcagg

SEQ ID NO: 2945 - DNA, 23 bp, Artificial Sequence
  sgRNA
tgacgttgttgtagaaagtcagg

SEQ ID NO: 2946 - DNA, 23 bp, Artificial Sequence
  sgRNA
cagatgctgccgtccaccgccgg

SEQ ID NO: 2947 - DNA, 23 bp, Artificial Sequence
  sgRNA
agatgctgccgtccaccgccggg

SEQ ID NO: 2948 - DNA, 23 bp, Artificial Sequence
  sgRNA
caccgccgggagcaccttcgtgg

SEQ ID NO: 2949 - DNA, 23 bp, Artificial Sequence
  sgRNA
gagcaccttcgtggtgtagatgg

SEQ ID NO: 2950 - DNA, 23 bp, Artificial Sequence
  sgRNA
tggcgttgagcgagacacagagg

SEQ ID NO: 2951 - DNA, 23 bp, Artificial Sequence
  sgRNA
gctagccagcacgccgaagacgg

SEQ ID NO: 2952 - DNA, 23 bp, Artificial Sequence
  sgRNA
agacggtgcccagccacgacagg

SEQ ID NO: 2953 - DNA, 23 bp, Artificial Sequence
  sgRNA
gacggtgcccagccacgacaggg

SEQ ID NO: 2954 - DNA, 23 bp, Artificial Sequence
  sgRNA
gggtgccttctgccccctcctgg

SEQ ID NO: 2955 - DNA, 23 bp, Artificial Sequence
  sgRNA
ctggtattacttgtaaacactgg

SEQ ID NO: 2956 - DNA, 23 bp, Artificial Sequence
  sgRNA
ctgatattacttgtaaacactgg

SEQ ID NO: 2957 - DNA, 23 bp, Artificial Sequence
  sgRNA
ctcaaccaccgtattctgattgg

SEQ ID NO: 2958 - DNA, 23 bp, Artificial Sequence
  sgRNA
tcaaccaccgtattctgattggg

SEQ ID NO: 2959 - DNA, 23 bp, Artificial Sequence
  sgRNA
tccacaccacagcacgcttctgg

SEQ ID NO: 2960 - DNA, 23 bp, Artificial Sequence
  sgRNA
ccacaccacagcacgcttctggg

SEQ ID NO: 2961 - DNA, 23 bp, Artificial Sequence
  sgRNA
cacaccacagcacgcttctgggg

SEQ ID NO: 2962 - DNA, 23 bp, Artificial Sequence
  sgRNA
acagcacgcttctggggtccagg

SEQ ID NO: 2963 - DNA, 23 bp, Artificial Sequence
  sgRNA
gaccgccttcactactgtgctgg

SEQ ID NO: 2964 - DNA, 23 bp, Artificial Sequence
  sgRNA
gtgctggccccgcctgtgtacgg

SEQ ID NO: 2965 - DNA, 23 bp, Artificial Sequence
  sgRNA
tgctggccccgcctgtgtacggg

SEQ ID NO: 2966 - DNA, 23 bp, Artificial Sequence
  sgRNA
ccccgcctgtgtacgggccccgg

SEQ ID NO: 2967 - DNA, 23 bp, Artificial Sequence
  sgRNA
cccgcctgtgtacgggccccggg

SEQ ID NO: 2968 - DNA, 23 bp, Artificial Sequence
  sgRNA
ccgcctgtgtacgggccccgggg

SEQ ID NO: 2969 - DNA, 23 bp, Artificial Sequence
  sgRNA
ctgtgtacgggccccggggccgg

SEQ ID NO: 2970 - DNA, 23 bp, Artificial Sequence
  sgRNA
tgtgtacgggccccggggccggg

SEQ ID NO: 2971 - DNA, 23 bp, Artificial Sequence
  sgRNA
gccccggggccgggccatccagg

SEQ ID NO: 2972 - DNA, 23 bp, Artificial Sequence
  sgRNA
ccccggggccgggccatccaggg

SEQ ID NO: 2973 - DNA, 23 bp, Artificial Sequence
  sgRNA
cgggccatccagggtgcctgtgg

SEQ ID NO: 2974 - DNA, 23 bp, Artificial Sequence
  sgRNA
ctgtggtgctcacacccccatgg

SEQ ID NO: 2975 - DNA, 23 bp, Artificial Sequence
  sgRNA
ggcgctcttctcgctgtctttgg

SEQ ID NO: 2976 - DNA, 23 bp, Artificial Sequence
  sgRNA
gcgctcttctcgctgtctttggg

SEQ ID NO: 2977 - DNA, 23 bp, Artificial Sequence
  sgRNA
cgctcttctcgctgtctttgggg

SEQ ID NO: 2978 - DNA, 23 bp, Artificial Sequence
  sgRNA
cttctcgctgtctttggggctgg

SEQ ID NO: 2979 - DNA, 23 bp, Artificial Sequence
  sgRNA
ttctcgctgtctttggggctggg

SEQ ID NO: 2980 - DNA, 23 bp, Artificial Sequence
  sgRNA
tctttggggctgggctcctccgg

SEQ ID NO: 2981 - DNA, 23 bp, Artificial Sequence
  sgRNA
catctcccagcccctgacccagg

SEQ ID NO: 2982 - DNA, 23 bp, Artificial Sequence
  sgRNA
ccagcccctgacccaggtgtagg

SEQ ID NO: 2983 - DNA, 23 bp, Artificial Sequence
  sgRNA
gcccctgacccaggtgtaggcgg

SEQ ID NO: 2984 - DNA, 23 bp, Artificial Sequence
  sgRNA
cctgacccaggtgtaggcggagg

SEQ ID NO: 2985 - DNA, 23 bp, Artificial Sequence
  sgRNA
tcatgttgctcgtccaccagagg

SEQ ID NO: 2986 - DNA, 23 bp, Artificial Sequence
  sgRNA
cgtccaccagaggaagctcttgg

SEQ ID NO: 2987 - DNA, 23 bp, Artificial Sequence
  sgRNA
ggtctcctcgtagtagagcacgg

SEQ ID NO: 2988 - DNA, 23 bp, Artificial Sequence
  sgRNA
agagcacggccagcactgtctgg

SEQ ID NO: 2989 - DNA, 23 bp, Artificial Sequence
  sgRNA
gagcacggccagcactgtctggg

SEQ ID NO: 2990 - DNA, 23 bp, Artificial Sequence
  sgRNA
ggccagcactgtctgggcacagg

SEQ ID NO: 2991 - DNA, 23 bp, Artificial Sequence
  sgRNA
cactgtctgggcacaggccttgg

SEQ ID NO: 2992 - DNA, 23 bp, Artificial Sequence
  sgRNA
tggccgtgcccgacacattgtgg

SEQ ID NO: 2993 - DNA, 23 bp, Artificial Sequence
  sgRNA
ggccgtgcccgacacattgtggg

SEQ ID NO: 2994 - DNA, 23 bp, Artificial Sequence
  sgRNA
cccgacacattgtgggtcagcgg

SEQ ID NO: 2995 - DNA, 23 bp, Artificial Sequence
  sgRNA
cacattgtgggtcagcggactgg

SEQ ID NO: 2996 - DNA, 23 bp, Artificial Sequence
  sgRNA
cagtcctgtcacgtagccgatgg

SEQ ID NO: 2997 - DNA, 23 bp, Artificial Sequence
  sgRNA
agccgatggcaaagccaaacagg

SEQ ID NO: 2998 - DNA, 23 bp, Artificial Sequence
  sgRNA
gcgtcatcatcccccagaagtgg

SEQ ID NO: 2999 - DNA, 23 bp, Artificial Sequence
  sgRNA
cgtcatcatcccccagaagtggg

SEQ ID NO: 3000 - DNA, 23 bp, Artificial Sequence
  sgRNA
agaagtgggcactgcccagctgg

SEQ ID NO: 3001 - DNA, 23 bp, Artificial Sequence
  sgRNA
gaagtgggcactgcccagctggg

SEQ ID NO: 3002 - DNA, 23 bp, Artificial Sequence
  sgRNA
ccagctgggcaaagtcacgcagg

SEQ ID NO: 3003 - DNA, 23 bp, Artificial Sequence
  sgRNA
cagctgggcaaagtcacgcaggg

SEQ ID NO: 3004 - DNA, 23 bp, Artificial Sequence
  sgRNA
cctgaagctccccgagcagcagg

SEQ ID NO: 3005 - DNA, 23 bp, Artificial Sequence
  sgRNA
gctccccgagcagcaggagcagg

SEQ ID NO: 3006 - DNA, 23 bp, Artificial Sequence
  sgRNA
ctccccgagcagcaggagcaggg

SEQ ID NO: 3007 - DNA, 23 bp, Artificial Sequence
  sgRNA
tccccgagcagcaggagcagggg

SEQ ID NO: 3008 - DNA, 23 bp, Artificial Sequence
  sgRNA
cgagcagcaggagcaggggcagg

SEQ ID NO: 3009 - DNA, 23 bp, Artificial Sequence
  sgRNA
gcaggagcaggggcaggaagagg

SEQ ID NO: 3010 - DNA, 23 bp, Artificial Sequence
  sgRNA
caggggcaggaagaggatgcagg

SEQ ID NO: 3011 - DNA, 23 bp, Artificial Sequence
  sgRNA
tgacgttgttgtagaaagtcagg

SEQ ID NO: 3012 - DNA, 23 bp, Artificial Sequence
  sgRNA
cagatgctgccgtccaccgccgg

SEQ ID NO: 3013 - DNA, 23 bp, Artificial Sequence
  sgRNA
agatgctgccgtccaccgccggg

SEQ ID NO: 3014 - DNA, 23 bp, Artificial Sequence
  sgRNA
caccgccgggagcaccttcgtgg

SEQ ID NO: 3015 - DNA, 23 bp, Artificial Sequence
  sgRNA
gagcaccttcgtggtgtagatgg

SEQ ID NO: 3016 - DNA, 23 bp, Artificial Sequence
  sgRNA
tggcgttgagcgagacacagagg

SEQ ID NO: 3017 - DNA, 23 bp, Artificial Sequence
  sgRNA
gctagccagcacgccgaagacgg

SEQ ID NO: 3018 - DNA, 23 bp, Artificial Sequence
  sgRNA
agacggtgcccagccacgacagg

SEQ ID NO: 3019 - DNA, 23 bp, Artificial Sequence
  sgRNA
gacggtgcccagccacgacaggg

SEQ ID NO: 3020 - DNA, 23 bp, Artificial Sequence
  sgRNA
gggtgccttctgccccctcctgg

SEQ ID NO: 3021 - protein, 1157 aa, Homo sapiens
MGKLRRRYNIKGRQQAGPGPSKGPPEPPPVQLELEDKDTLKGVDASNALVLPGKKKKKTKAPPLSKKEKKPLTKKEKKVLQKILEQKEKKSQRAEMLQKLSEVQASEAEMRLFYTTSKLGTGNRMYHTKEKADEVVAPGQEKISSLSGAHRKRRRWPSAEEEEEEEEESESELEEESELDEDPAAEPAEAGVGTTVAPLPPAPAPSSQPVPAGMTVPPPPAAAPPLPRALAKPAVFIPVNRSPEMQEERLKLPILSEEQVIMEAVAEHPIVIVCGETGSGKTTQVPQFLYEAGFSSEDSIIGVTEPRRVAAVAMSQRVAKEMNLSQRVVSYQIRYEGNVTEETRIKFMTDGVLLKEIQKDFLLLRYKVVIIDEAHERSVYTDILIGLLSRIVTLRAKRNLPLKLLIMSATLRVEDFTQNPRLFAKPPPVIKVESRQFPVTVHFNKRTPLEDYSGECFRKVCKIHRMLPAGGILVFLTGQAEVHALCRRLRKAFPPSRARPQEKDDDQKDSVEEMRKFKKSRARAKKARAEVLPQINLDHYSVLPAGEGDEDREAEVDEEEGALDSDLDLDLGDGGQDGGEQPDASLPLHVLPLYSLLAPEKQAQVFKPPPEGTRLCVVATNVAETSLTIPGIKYVVDCGKVKKRYYDRVTGVSSFRVTWVSQASADQRAGRAGRTEPGHCYRLYSSAVFGDFEQFPPPEITRRPVEDLILQMKALNVEKVINFPFPTPPSVEALLAAEELLIALGALQPPQKAERVKQLQENRLSCPITALGRTMATFPVAPRYAKMLALSRQHGCLPYAITIVASMTVRELFEELDRPAASDEELTRLKSKRARVAQMKRTWAGQGASLKLGDLMVLLGAVGACEYASCTPQFCEANGLRYKAMMEIRRLRGQLTTAVNAVCPEAELFVDPKMQPPTESQVTYLRQIVTAGLGDHLARRVQSEEMLEDKWRNAYKTPLLDDPVFIHPSSVLFKELPEFVVYQEIVETTKMYMKGVSSVEVQWIPALLPSYCQFDKPLEEPAPTYCPERGRVLCHRASVFYRVGWPLPAIEVDFPEGIDRYKHFARFLLEGQVFRKLASYRSCLLSSPGTMLKTWARLQPRTESLLRALVAEKADCHEALLAAWKKNPKYLLAEYCEWLPQAMHPDIEKAWPPTTVH

SEQ ID NO: 3022 - protein, 20 aa, Homo sapiens
QFCEANGLRYKAMMEIRRLR

SEQ ID NO: 3023 - protein, 20 aa, Homo sapiens
AETSLTIPGIKYVVDCGKVK

SEQ ID NO: 3024 - protein, 20 aa, Homo sapiens
LLRYKVVIIDEAHERSVYTD

SEQ ID NO: 3025 - protein, 20 aa, Homo sapiens
LEDKDTLKGVDASNALVLPG

SEQ ID NO: 3026 - protein, 20 aa, Homo sapiens
VIMEAVAEHPIVIVCGETGS

SEQ ID NO: 3027 - protein, 20 aa, Homo sapiens
AGLGDHLARRVQSEEMLEDK

SEQ ID NO: 3028 - protein, 20 aa, Homo sapiens
VAAVAMSQRVAKEMNLSQRV

SEQ ID NO: 3029 - protein, 20 aa, Homo sapiens
LPRALAKPAVFIPVNRSPEM

SEQ ID NO: 3030 - protein, 20 aa, Homo sapiens
QEKISSLSGAHRKRRRWPSA

SEQ ID NO: 3031 - protein, 20 aa, Homo sapiens
TKMYMKGVSSVEVQWIPALL

SEQ ID NO: 3032 - DNA, 19 bp, Artificial Sequence
  primer
cccgaggggacccagagag

SEQ ID NO: 3033 - DNA, 22 bp, Artificial Sequence
  primer
caattcccactcctttcaagac

SEQ ID NO: 3034 - DNA, 20 bp, Artificial Sequence
  cutadapt sequence
gttttagagctagaaatggc

SEQ ID NO: 3035 - DNA, 20 bp, Artificial sequence
  cutadapt sequence
gtggaaaggacgaaacaccg
